(19) United States
(12) Patent Application Publication
(10) Pub. No.: US 2003/0087818 A1
(43) Pub. Date: May 8, 2003

(54) Compositions and methods for the therapy and diagnosis of colon cancer

(75) Inventors: Yuqiu Jiang, Kent, WA (US); Ruth A. Chenault, Seattle, WA (US); Jiangchun Xu, Bellevue, WA (US); Carol Yoseph Indirias, Seattle, WA (US); Michael J. Lodes, Seattle, WA (US); Heather Secrist, Seattle, WA (US); Darrick Carter, Seattle, WA (US); Gary R. Fanger, Mill Creek, WA (US); Carole L. Smith, Seattle, WA (US); Margarita Durham, Seattle, WA (US); John A. Stolk, Bothell, WA (US)

Correspondence Address: SEED INTELLECTUAL PROPERTY LAW GROUP PLLC, 701 FIFTH AVE, SUITE 6300, SEATTLE, WA, 98104-7092, US

(73) Assignee: Corixa Corporation, Seattle, WA (US)

(21) Appl. No.: 10/066,543

(22) Filed: Feb. 1, 2002

Related U.S. Application Data
(60) Provisional application No. 60/313,077, filed on Aug. 16, 2001.
(60) Provisional application No. 60/290,322, filed on May 11, 2001.
(60) Provisional application No. 60/267,400, filed on Feb. 2, 2001.
(60) Provisional application No. 60/305,265, filed on Jul. 12, 2001.
(60) Provisional application No. 60/267,382, filed on Feb. 7, 2001.

(51) Int. Cl. A61K 38/17; C07H 21/04; C12N 9/00; C12P 21/02; C12N 5/06

(52) U.S. Cl. 514/12; 435/69.1; 435/183; 435/320.1; 435/325; 536/23.2

(57) ABSTRACT

Compositions and methods for the therapy and diagnosis of cancer, particularly colon cancer, are disclosed. Illustrative compositions comprise one or more colon tumor polypeptides, immunogenic portions thereof, polynucleotides that encode such polypeptides, antigen presenting cell that expresses such polypeptides, and T cells that are specific for cells expressing such polypeptides. The disclosed compositions are useful, for example, in the diagnosis, prevention and/or treatment of diseases, particularly colon cancer.

### STATEMENT REGARDING SEQUENCE LISTING

[0001] The Sequence Listing associated with this application is provided on CD-ROM in lieu of a paper copy, and is hereby incorporated by reference into the specification. Three CD-ROMs are provided, containing identical copies of the sequence listing: CD-ROM No. 1 is labeled COPY 1, contains the file 563.app which is 2.2 MB and created on Feb. 1, 2002; CD-ROM No.2 is labeled COPY 2, contains the file 563.app which is 2.2 MB and created on Feb. 1, 2002; CD-ROM No. 3 is labeled CRF, contains the file 563.app which is 2.2 MB and created on Feb. 1, 2002.

### BACKGROUND OF THE INVENTION

[0002] 1. Field of the Invention

[0003] The present invention relates generally to therapy and diagnosis of cancer, such as colon cancer. The invention is more specifically related to polypeptides, comprising at least a portion of a colon tumor protein, and to polynucleotides encoding such polypeptides. Such polypeptides and polynucleotides are useful in pharmaceutical compositions, e.g., vaccines, and other compositions for the diagnosis and treatment of colon cancer.

[0004] 2. Description of the Related Art

[0005] Cancer is a significant health problem throughout the world. Although advances have been made in detection and therapy of cancer, no vaccine or other universally successful method for prevention and/or treatment is currently available. Current therapies, which are generally based on a combination of chemotherapy or surgery and radiation, continue to prove inadequate in many patients.

[0006] Colon cancer is the second most frequently diagnosed malignancy in the United States as well as the second most common cause of cancer death. The five-year survival rate for patients with colorectal cancer detected in an early localized stage is 92%; unfortunately, only 37% of colorectal cancer is diagnosed at this stage. The survival rate drops to 64% if the cancer is allowed to spread to adjacent organs or lymph nodes, and to 7% in patients with distant metastases.

[0007] The prognosis of colon cancer is directly related to the degree of penetration of the tumor through the bowel wall and the presence or absence of nodal involvement, consequently, early detection and treatment are especially important. Currently, diagnosis is aided by the use of screening assays for fecal occult blood, sigmoidoscopy, colonoscopy and double contrast barium enemas. Treatment regimens are determined by the type and stage of the cancer, and include surgery, radiation therapy and/or chemotherapy. Recurrence following surgery (the most common form of therapy) is a major problem and is often the ultimate cause of death. In spite of considerable research into therapies for the disease, colon cancer remains difficult to diagnose and treat. In spite of considerable research into therapies for these and other cancers, colon cancer remains difficult to diagnose and treat effectively. Accordingly, there is a need in the art for improved methods for detecting and treating such cancers. The present invention fulfills these needs and further provides other related advantages.

[0008] In spite of considerable research into therapies for these and other cancers, colon cancer remains difficult to diagnose and treat effectively. Accordingly, there is a need in the art for improved methods for detecting and treating such cancers. The present invention fulfills these needs and further provides other related advantages.

### BRIEF SUMMARY OF THE INVENTION

[0009] In one aspect, the present invention provides polynucleotide compositions comprising a sequence selected from the group consisting of:

[0010] (a) sequences provided in SEQ ID NOs: 1-1421, 1425, 1427, and 1430-3417;

[0011] (b) complements of the sequences provided in SEQ ID NOs: 1-1421, 1425, 1427, and 1430-3417;

[0012] (c) sequences consisting of at least 20, 25, 30, 35, 40, 45, 50, 75 and 100 contiguous residues of a sequence provided in SEQ ID NOs: 1-1421, 1425, 1427, and 1430-3417;

[0013] (d) sequences that hybridize to a sequence provided in SEQ ID NOs: 1-1421, 1425, 1427, and 1430-3417, under moderate or highly stringent conditions;

[0014] (e) sequences having at least 75%, 80%, 85%, 90%, 95%, 96%, 97%, 98% or 99% identity to a sequence of SEQ ID NOs: 1-1421, 1425, 1427, and 1430-3417;

[0015] (f) degenerate variants of a sequence provided in SEQ ID NOs: 1-1421, 1425, 1427, and 1430-3417.

[0016] In one preferred embodiment, the polynucleotide compositions of the invention are expressed in at least about 20%, more preferably in at least about 30%, and most preferably in at least about 50% of colon tumor samples tested, at a level that is at least about 2-fold, preferably at least about 5-fold, and most preferably at least about 10-fold higher than that for normal tissues.

[0017] The present invention, in another aspect, provides polypeptide compositions comprising an amino acid sequence that is encoded by a polynucleotide sequence described above.

[0018] The present invention further provides polypeptide compositions comprising an amino acid sequence selected from the group consisting of sequences recited in SEQ ID NOs: 1422-1424, 1426, 1428, and 1429.

[0019] In certain preferred embodiments, the polypeptides and/or polynucleotides of the present invention are immunogenic, i.e., they are capable of eliciting an immune response, particularly a humoral and/or cellular immune response, as further described herein.

[0020] The present invention further provides fragments, variants and/or derivatives of the disclosed polypeptide and/or polynucleotide sequences, wherein the fragments, variants and/or derivatives preferably have a level of immunogenic activity of at least about 50%, preferably at least about 70% and more preferably at least about 90% of the level of immunogenic activity of a polypeptide sequence set forth in SEQ ID NOs: 1422-1424, 1426, 1428, and 1429 or a polypeptide sequence encoded by a polynucleotide sequence set forth in SEQ ID NOs: 1-1421, 1425, 1427, and 1430-3417.

[0021] The present invention further provides polynucleotides that encode a polypeptide described above, expression vectors comprising such polynucleotides and host cells transformed or transfected with such expression vectors.

[0022] Within other aspects, the present invention provides pharmaceutical compositions comprising a polypeptide or polynucleotide as described above and a physiologically acceptable carrier.

[0023] Within a related aspect of the present invention, the pharmaceutical compositions, e.g., vaccine compositions, are provided for prophylactic or therapeutic applications. Such compositions generally comprise an immunogenic polypeptide or polynucleotide of the invention and an immunostimulant, such as an adjuvant.

[0024] The present invention further provides pharmaceutical compositions that comprise: (a) an antibody or antigen-binding fragment thereof that specifically binds to a polypeptide of the present invention, or a fragment thereof; and (b) a physiologically acceptable carrier.

[0025] Within further aspects, the present invention provides pharmaceutical compositions comprising: (a) an antigen presenting cell that expresses a polypeptide as described above and (b) a pharmaceutically acceptable carrier or excipient. Illustrative antigen presenting cells include dendritic cells, macrophages, monocytes, fibroblasts and B cells.

[0026] Within related aspects, pharmaceutical compositions are provided that comprise: (a) an antigen presenting cell that expresses a polypeptide as described above and (b) an immunostimulant.

[0027] The present invention further provides, in other aspects, fusion proteins that comprise at least one polypeptide as described above, as well as polynucleotides encoding such fusion proteins, typically in the form of pharmaceutical compositions, e.g., vaccine compositions, comprising a physiologically acceptable carrier and/or an immunostimulant. The fusions proteins may comprise multiple immunogenic polypeptides or portions/variants thereof, as described herein, and may further comprise one or more polypeptide segments for facilitating the expression, purification and/or immunogenicity of the polypeptide(s).

[0028] Within further aspects, the present invention provides methods for stimulating an immune response in a patient, preferably a T cell response in a human patient, comprising administering a pharmaceutical composition described herein. The patient may be afflicted with colon cancer, in which case the methods provide treatment for the disease, or patient considered at risk for such a disease may be treated prophylactically.

[0029] Within further aspects, the present invention provides methods for inhibiting the development of a cancer in a patient, comprising administering to a patient a pharmaceutical composition as recited above. The patient may be afflicted with colon cancer, in which case the methods provide treatment for the disease, or patient considered at risk for such a disease may be treated prophylactically.

[0030] The present invention further provides, within other aspects, methods for removing tumor cells from a biological sample, comprising contacting a biological sample with T cells that specifically react with a polypeptide of the present invention, wherein the step of contacting is performed under conditions and for a time sufficient to permit the removal of cells expressing the protein from the sample.

[0031] Within related aspects, methods are provided for inhibiting the development of a cancer in a patient, comprising administering to a patient a biological sample treated as described above.

[0032] Methods are further provided, within other aspects, for stimulating and/or expanding T cells specific for a polypeptide of the present invention, comprising contacting T cells with one or more of: (i) a polypeptide as described above; (ii) a polynucleotide encoding such a polypeptide; and/or (iii) an antigen presenting cell that expresses such a polypeptide; under conditions and for a time sufficient to permit the stimulation and/or expansion of T cells. Isolated T cell populations comprising T cells prepared as described above are also provided.

[0033] Within further aspects, the present invention provides methods for inhibiting the development of a cancer in a patient, comprising administering to a patient an effective amount of a T cell population as described above.

[0034] The present invention further provides methods for inhibiting the development of a cancer in a patient, comprising the steps of: (a) incubating CD4⁺ and/or CD8⁺ T cells isolated from a patient with one or more of: (i) a polypeptide comprising at least an immunogenic portion of polypeptide disclosed herein; (ii) a polynucleotide encoding such a polypeptide; and (iii) an antigen-presenting cell that expressed such a polypeptide; and (b) administering to the patient an effective amount of the proliferated T cells, and thereby inhibiting the development of a cancer in the patient. Proliferated cells may, but need not, be cloned prior to administration to the patient.

[0035] Within further aspects, the present invention provides methods for determining the presence or absence of a cancer, preferably a colon cancer, in a patient comprising: (a) contacting a biological sample obtained from a patient with a binding agent that binds to a polypeptide as recited above; (b) detecting in the sample an amount of polypeptide that binds to the binding agent; and (c) comparing the amount of polypeptide with a predetermined cut-off value, and therefrom determining the presence or absence of a cancer in the patient. Within preferred embodiments, the binding agent is an antibody, more preferably a monoclonal antibody.

[0036] The present invention also provides, within other aspects, methods for monitoring the progression of a cancer in a patient. Such methods comprise the steps of: (a) contacting a biological sample obtained from a patient at a first point in time with a binding agent that binds to a polypeptide as recited above; (b) detecting in the sample an amount of polypeptide that binds to the binding agent; (c) repeating steps (a) and (b) using a biological sample obtained from the patient at a subsequent point in time; and (d) comparing the amount of polypeptide detected in step (c) with the amount detected in step (b) and therefrom monitoring the progression of the cancer in the patient.

[0037] The present invention further provides, within other aspects, methods for determining the presence or absence of a cancer in a patient, comprising the steps of: (a) contacting a biological sample, e.g., tumor sample, serum sample, etc., obtained from a patient with an oligonucleotide that hybridizes to a polynucleotide that encodes a polypeptide of the present invention; (b) detecting in the sample a level of a polynucleotide, preferably mRNA, that hybridizes to the oligonucleotide; and (c) comparing the level of polynucleotide that hybridizes to the oligonucleotide with a predetermined cut-off value, and therefrom determining the presence or absence of a cancer in the patient. Within certain embodiments, the amount of mRNA is detected via polymerase chain reaction using, for example, at least one oligonucleotide primer that hybridizes to a polynucleotide encoding a polypeptide as recited above, or a complement of such a polynucleotide. Within other embodiments, the amount of mRNA is detected using a hybridization technique, employing an oligonucleotide probe that hybridizes to a polynucleotide that encodes a polypeptide as recited above, or a complement of such a polynucleotide.

[0038] In related aspects, methods are provided for monitoring the progression of a cancer in a patient, comprising the steps of: (a) contacting a biological sample obtained from a patient with an oligonucleotide that hybridizes to a polynucleotide that encodes a polypeptide of the present invention; (b) detecting in the sample an amount of a polynucleotide that hybridizes to the oligonucleotide; (c) repeating steps (a) and (b) using a biological sample obtained from the patient at a subsequent point in time; and (d) comparing the amount of polynucleotide detected in step (c) with the amount detected in step (b) and therefrom monitoring the progression of the cancer in the patient.

[0039] Within further aspects, the present invention provides antibodies, such as monoclonal antibodies, that bind to a polypeptide as described above, as well as diagnostic kits comprising such antibodies. Diagnostic kits comprising one or more oligonucleotide probes or primers as described above are also provided.

[0040] These and other aspects of the present invention will become apparent upon reference to the following detailed description. All references disclosed herein are hereby incorporated by reference in their entirety as if each was incorporated individually.

### BRIEF DESCRIPTION OF THE SEQUENCE IDENTIFIERS

[0041] SEQ ID NO: 1-254 are the determined cDNA sequences described in Tables 2-10.

[0042] SEQ ID NO: 255 is the determined cDNA sequence for clone 63716879.

[0043] SEQ ID NO: 256 is the determined cDNA sequence for clone 63716880.

[0044] SEQ ID NO: 257 is the determined cDNA sequence for clone 63716882.

[0045] SEQ ID NO: 258 is the determined cDNA sequence for clone 63716883.

[0046] SEQ ID NO: 259 is the determined cDNA sequence for clone 63716884.

[0047] SEQ ID NO: 260 is the determined cDNA sequence for clone 63716885.

[0048] SEQ ID NO: 261 is the determined cDNA sequence for clone 63716886.

[0049] SEQ ID NO: 262 is the determined cDNA sequence for clone 63716887.

[0050] SEQ ID NO: 263 is the determined cDNA sequence for clone 63716888.

[0051] SEQ ID NO: 264 is the determined cDNA sequence for clone 63716889.

[0052] SEQ ID NO: 265 is the determined cDNA sequence for clone 63716890.

[0053] SEQ ID NO: 266 is the determined cDNA sequence for clone 63716891.

[0054] SEQ ID NO: 267 is the determined cDNA sequence for clone 63716892.

[0055] SEQ ID NO: 268 is the determined cDNA sequence for clone 63716894.

[0056] SEQ ID NO: 269 is the determined cDNA sequence for clone 63716895.

[0057] SEQ ID NO: 270 is the determined cDNA sequence for clone 63716896.

[0058] SEQ ID NO: 271 is the determined cDNA sequence for clone 63716897.

[0059] SEQ ID NO: 272 is the determined cDNA sequence for clone 63716898.

[0060] SEQ ID NO: 273 is the determined cDNA sequence for clone 63716899.

[0061] SEQ ID NO: 274 is the determined cDNA sequence for clone 63716901.

[0062] SEQ ID NO: 275 is the determined cDNA sequence for clone 63716902.

[0063] SEQ ID NO: 276 is the determined cDNA sequence for clone 63716903.

[0064] SEQ ID NO: 277 is the determined cDNA sequence for clone 63716904.

[0065] SEQ ID NO: 278 is the determined cDNA sequence for clone 63716905.

[0066] SEQ ID NO: 279 is the determined cDNA sequence for clone 63716906.

[0067] SEQ ID NO: 280 is the determined cDNA sequence for clone 63716907.

[0068] SEQ ID NO: 281 is the determined cDNA sequence for clone 63716908.

[0069] SEQ ID NO: 282 is the determined cDNA sequence for clone 63716909.

[0070] SEQ ID NO: 283 is the determined cDNA sequence for clone 63716910.

[0071] SEQ ID NO: 284 is the determined cDNA sequence for clone 63716911.

[0072] SEQ ID NO: 285 is the determined cDNA sequence for clone 63716912.

[0073] SEQ ID NO: 286 is the determined cDNA sequence for clone 63716914.

[0074] SEQ ID NO: 287 is the determined cDNA sequence for clone 63716915.

[0075] SEQ ID NO: 288 is the determined cDNA sequence for clone 63716916.

[0076] SEQ ID NO: 289 is the determined cDNA sequence for clone 63716918.

[0077] SEQ ID NO: 290 is the determined cDNA sequence for clone 63716919.

[0078] SEQ ID NO: 291 is the determined cDNA sequence for clone 63716920.

[0079] SEQ ID NO: 292 is the determined cDNA sequence for clone 63716922.

[0080] SEQ ID NO: 293 is the determined cDNA sequence for clone 63716923.

[0081] SEQ ID NO: 294 is the determined cDNA sequence for clone 63716924.

[0082] SEQ ID NO: 295 is the determined cDNA sequence for clone 63716925.

[0083] SEQ ID NO: 296 is the determined cDNA sequence for clone 63716926.

[0084] SEQ ID NO: 297 is the determined cDNA sequence for clone 63716927.

[0085] SEQ ID NO: 298 is the determined cDNA sequence for clone 63716928.

[0086] SEQ ID NO: 299 is the determined cDNA sequence for clone 63716929.

[0087] SEQ ID NO: 300 is the determined cDNA sequence for clone 63716930.

[0088] SEQ ID NO: 301 is the determined cDNA sequence for clone 63716931.

[0089] SEQ ID NO: 302 is the determined cDNA sequence for clone 63716932.

[0090] SEQ ID NO: 303 is the determined cDNA sequence for clone 63716933.

[0091] SEQ ID NO: 304 is the determined cDNA sequence for clone 63716934.

[0092] SEQ ID NO: 305 is the determined cDNA sequence for clone 63716935.

[0093] SEQ ID NO: 306 is the determined cDNA sequence for clone 63716936.

[0094] SEQ ID NO: 307 is the determined cDNA sequence for clone 63716937.

[0095] SEQ ID NO: 308 is the determined cDNA sequence for clone 63716938.

[0096] SEQ ID NO: 309 is the determined cDNA sequence for clone 63716939.

[0097] SEQ ID NO: 310 is the determined cDNA sequence for clone 63716940.

[0098] SEQ ID NO: 311 is the determined cDNA sequence for clone 63716941.

[0099] SEQ ID NO: 312 is the determined cDNA sequence for clone 63716942.

[0100] SEQ ID NO: 313 is the determined cDNA sequence for clone 63716943.

[0101] SEQ ID NO: 314 is the determined cDNA sequence for clone 63716944.

[0102] SEQ ID NO: 315 is the determined cDNA sequence for clone 63716945.

[0103] SEQ ID NO: 316 is the determined cDNA sequence for clone 63716946.

[0104] SEQ ID NO: 317 is the determined cDNA sequence for clone 63716948.

[0105] SEQ ID NO: 318 is the determined cDNA sequence for clone 63716949.

[0106] SEQ ID NO: 319 is the determined cDNA sequence for clone 63716950.

[0107] SEQ ID NO: 320 is the determined cDNA sequence for clone 63716951.

[0108] SEQ ID NO: 321 is the determined cDNA sequence for clone 63716953.

[0109] SEQ ID NO: 322 is the determined cDNA sequence for clone 63716954.

[0110] SEQ ID NO: 323 is the determined cDNA sequence for clone 63716955.

[0111] SEQ ID NO: 324 is the determined cDNA sequence for clone 63716956.

[0112] SEQ ID NO: 325 is the determined cDNA sequence for clone 63716957.

[0113] SEQ ID NO: 326 is the determined cDNA sequence for clone 63716958.

[0114] SEQ ID NO: 327 is the determined cDNA sequence for clone 63716959.

[0115] SEQ ID NO: 328 is the determined cDNA sequence for clone 63716960.

[0116] SEQ ID NO: 329 is the determined cDNA sequence for clone 63716961.

[0117] SEQ ID NO: 330 is the determined cDNA sequence for clone 63716962.

[0118] SEQ ID NO: 331 is the determined cDNA sequence for clone 63716963.

[0119] SEQ ID NO: 332 is the determined cDNA sequence for clone 63716964.

[0120] SEQ ID NO: 333 is the determined cDNA sequence for clone 63716965.

[0121] SEQ ID NO: 334 is the determined cDNA sequence for clone 63716966.

[0122] SEQ ID NO: 335 is the determined cDNA sequence for clone 63716967.

[0123] SEQ ID NO: 336 is the determined cDNA sequence for clone 63716968.

[0124] SEQ ID NO: 337 is the determined cDNA sequence for clone 63716970.

[0125] SEQ ID NO: 338 is the determined cDNA sequence for clone 63716971.

[0126] SEQ ID NO: 339 is the determined cDNA sequence for clone 63716786.

[0127] SEQ ID NO: 340 is the determined cDNA sequence for clone 63716787.

[0128] SEQ ID NO: 341 is the determined cDNA sequence for clone 63716788.

[0129] SEQ ID NO: 342 is the determined cDNA sequence for clone 63716789.

[0130] SEQ ID NO: 343 is the determined cDNA sequence for clone 63716790.

[0131] SEQ ID NO: 344 is the determined cDNA sequence for clone 63716792.

[0132] SEQ ID NO: 345 is the determined cDNA sequence for clone 63716793.

[0133] SEQ ID NO: 346 is the determined cDNA sequence for clone 63716794.

[0134] SEQ ID NO: 347 is the determined cDNA sequence for clone 63716798.

[0135] SEQ ID NO: 348 is the determined cDNA sequence for clone 63716799.

[0136] SEQ ID NO: 349 is the determined cDNA sequence for clone 63716802.

[0137] SEQ ID NO: 350 is the determined cDNA sequence for clone 63716803.

[0138] SEQ ID NO: 351 is the determined cDNA sequence for clone 63716806.

[0139] SEQ ID NO: 352 is the determined cDNA sequence for clone 63716807.

[0140] SEQ ID NO: 353 is the determined cDNA sequence for clone 63716810.

[0141] SEQ ID NO: 354 is the determined cDNA sequence for clone 63716811.

[0142] SEQ ID NO: 355 is the determined cDNA sequence for clone 63716812.

[0143] SEQ ID NO: 356 is the determined cDNA sequence for clone 63716813.

[0144] SEQ ID NO: 357 is the determined cDNA sequence for clone 63716814.

[0145] SEQ ID NO: 358 is the determined cDNA sequence for clone 63716815.

[0146] SEQ ID NO: 359 is the determined cDNA sequence for clone 63716816.

[0147] SEQ ID NO: 360 is the determined cDNA sequence for clone 63716817.

[0148] SEQ ID NO: 361 is the determined cDNA sequence for clone 63716818.

[0149] SEQ ID NO: 362 is the determined cDNA sequence for clone 63716819.

[0150] SEQ ID NO: 363 is the determined cDNA sequence for clone 63716820.

[0151] SEQ ID NO: 364 is the determined cDNA sequence for clone 63716822.

[0152] SEQ ID NO: 365 is the determined cDNA sequence for clone 63716824.

[0153] SEQ ID NO: 366 is the determined cDNA sequence for clone 63716825.

[0154] SEQ ID NO: 367 is the determined cDNA sequence for clone 63716826.

[0155] SEQ ID NO: 368 is the determined cDNA sequence for clone 63716828.

[0156] SEQ ID NO: 369 is the determined cDNA sequence for clone 63716829.

[0157] SEQ ID NO: 370 is the determined cDNA sequence for clone 63716830.

[0158] SEQ ID NO: 371 is the determined cDNA sequence for clone 63716831.

[0159] SEQ ID NO: 372 is the determined cDNA sequence for clone 63716834.

[0160] SEQ ID NO: 373 is the determined cDNA sequence for clone 63716835.

[0161] SEQ ID NO: 374 is the determined cDNA sequence for clone 63716836.

[0162] SEQ ID NO: 375 is the determined cDNA sequence for clone 63716837.

[0163] SEQ ID NO: 376 is the determined cDNA sequence for clone 63716838.

[0164] SEQ ID NO: 377 is the determined cDNA sequence for clone 63716839.

[0165] SEQ ID NO: 378 is the determined cDNA sequence for clone 63716842.

[0166] SEQ ID NO: 379 is the determined cDNA sequence for clone 63716843.

[0167] SEQ ID NO: 380 is the determined cDNA sequence for clone 63716844.

[0168] SEQ ID NO: 381 is the determined cDNA sequence for clone 63716846.

[0169] SEQ ID NO: 382 is the determined cDNA sequence for clone 63716847.

[0170] SEQ ID NO: 383 is the determined cDNA sequence for clone 63716848.

[0171] SEQ ID NO: 384 is the determined cDNA sequence for clone 63716851.

[0172] SEQ ID NO: 385 is the determined cDNA sequence for clone 63716852.

[0173] SEQ ID NO: 386 is the determined cDNA sequence for clone 63716853.

[0174] SEQ ID NO: 387 is the determined cDNA sequence for clone 63716855.

[0175] SEQ ID NO: 388 is the determined cDNA sequence for clone 63716858.

[0176] SEQ ID NO: 389 is the determined cDNA sequence for clone 63716860.

[0177] SEQ ID NO: 390 is the determined cDNA sequence for clone 63716861.

[0178] SEQ ID NO: 391 is the determined cDNA sequence for clone 63716862.

[0179] SEQ ID NO: 392 is the determined cDNA sequence for clone 63716863.

[0180] SEQ ID NO: 393 is the determined cDNA sequence for clone 63716865.

[0181] SEQ ID NO: 394 is the determined cDNA sequence for clone 63716866.

[0182] SEQ ID NO: 395 is the determined cDNA sequence for clone 63716868.

[0183] SEQ ID NO: 396 is the determined cDNA sequence for clone 63716869.

[0184] SEQ ID NO: 397 is the determined cDNA sequence for clone 63716870.

[0185] SEQ ID NO: 398 is the determined cDNA sequence for clone 63716871.

[0186] SEQ ID NO: 399 is the determined cDNA sequence for clone 63716873.

[0187] SEQ ID NO: 400 is the determined cDNA sequence for clone 63716875.

[0188] SEQ ID NO: 401 is the determined cDNA sequence for clone 63716876.

[0189] SEQ ID NO: 402 is the determined cDNA sequence for clone 63716877.

[0190] SEQ ID NO: 403 is the determined cDNA sequence for clone 63716878.

[0191] SEQ ID NO: 404 is the determined cDNA sequence for clone 63717158.

[0192] SEQ ID NO: 405 is the determined cDNA sequence for clone 63717160.

[0193] SEQ ID NO: 406 is the determined cDNA sequence for clone 63717161.

[0194] SEQ ID NO: 407 is the determined cDNA sequence for clone 63717163.

[0195] SEQ ID NO: 408 is the determined cDNA sequence for clone 63717164.

[0196] SEQ ID NO: 409 is the determined cDNA sequence for clone 63717165.

[0197] SEQ ID NO: 410 is the determined cDNA sequence for clone 63717166.

[0198] SEQ ID NO: 411 is the determined cDNA sequence for clone 63717167.

[0199] SEQ ID NO: 412 is the determined cDNA sequence for clone 63717169.

[0200] SEQ ID NO: 413 is the determined cDNA sequence for clone 63717171.

[0201] SEQ ID NO: 414 is the determined cDNA sequence for clone 63717172.

[0202] SEQ ID NO: 415 is the determined cDNA sequence for clone 63717173.

[0203] SEQ ID NO: 416 is the determined cDNA sequence for clone 63717174.

[0204] SEQ ID NO: 417 is the determined cDNA sequence for clone 63717175.

[0205] SEQ ID NO: 418 is the determined cDNA sequence for clone 63717176.

[0206] SEQ ID NO: 419 is the determined cDNA sequence for clone 63717177.

[0207] SEQ ID NO: 420 is the determined cDNA sequence for clone 63717178.

[0208] SEQ ID NO: 421 is the determined cDNA sequence for clone 63717179.

[0209] SEQ ID NO: 422 is the determined cDNA sequence for clone 63717180.

[0210] SEQ ID NO: 423 is the determined cDNA sequence for clone 63717181.

[0211] SEQ ID NO: 424 is the determined cDNA sequence for clone 63717182.

[0212] SEQ ID NO: 425 is the determined cDNA sequence for clone 63717183.

[0213] SEQ ID NO: 426 is the determined cDNA sequence for clone 63717184.

[0214] SEQ ID NO: 427 is the determined cDNA sequence for clone 63717186.

[0215] SEQ ID NO: 428 is the determined cDNA sequence for clone 63717187.

[0216] SEQ ID NO: 429 is the determined cDNA sequence for clone 63717189.

[0217] SEQ ID NO: 430 is the determined cDNA sequence for clone 63717190.

[0218] SEQ ID NO: 431 is the determined cDNA sequence for clone 63717191.

[0219] SEQ ID NO: 432 is the determined cDNA sequence for clone 63717192.

[0220] SEQ ID NO: 433 is the determined cDNA sequence for clone 63717193.

[0221] SEQ ID NO: 434 is the determined cDNA sequence for clone 63717194.

[0222] SEQ ID NO: 435 is the determined cDNA sequence for clone 63717197.

[0223] SEQ ID NO: 436 is the determined cDNA sequence for clone 63717199.

[0224] SEQ ID NO: 437 is the determined cDNA sequence for clone 63717200.

[0225] SEQ ID NO: 438 is the determined cDNA sequence for clone 63717201.

[0226] SEQ ID NO: 439 is the determined cDNA sequence for clone 63717202.

[0227] SEQ ID NO: 440 is the determined cDNA sequence for clone 63717203.

[0228] SEQ ID NO: 441 is the determined cDNA sequence for clone 63717204.

[0229] SEQ ID NO: 442 is the determined cDNA sequence for clone 63717205.

[0230] SEQ ID NO: 443 is the determined cDNA sequence for clone 63717206.

[0231] SEQ ID NO: 444 is the determined cDNA sequence for clone 63717207.

[0232] SEQ ID NO: 445 is the determined cDNA sequence for clone 63717208.

[0233] SEQ ID NO: 446 is the determined cDNA sequence for clone 63717209.

[0234] SEQ ID NO: 447 is the determined cDNA sequence for clone 63717211.

[0235] SEQ ID NO: 448 is the determined cDNA sequence for clone 63717212.

[0236] SEQ ID NO: 449 is the determined cDNA sequence for clone 63717213.

[0237] SEQ ID NO: 450 is the determined cDNA sequence for clone 63717214.

[0238] SEQ ID NO: 451 is the determined cDNA sequence for clone 63717215.

[0239] SEQ ID NO: 452 is the determined cDNA sequence for clone 63717216.

[0240] SEQ ID NO: 453 is the determined cDNA sequence for clone 63717217.

[0241] SEQ ID NO: 454 is the determined cDNA sequence for clone 63717218.

[0242] SEQ ID NO: 455 is the determined cDNA sequence for clone 63717219.

[0243] SEQ ID NO: 456 is the determined cDNA sequence for clone 63717221.

[0244] SEQ ID NO: 457 is the determined cDNA sequence for clone 63717222.

[0245] SEQ ID NO: 458 is the determined cDNA sequence for clone 63717223.

[0246] SEQ ID NO: 459 is the determined cDNA sequence for clone 63717224.

[0247] SEQ ID NO: 460 is the determined cDNA sequence for clone 63717227.

[0248] SEQ ID NO: 461 is the determined cDNA sequence for clone 63717228.

[0249] SEQ ID NO: 462 is the determined cDNA sequence for clone 63717229.

[0250] SEQ ID NO: 463 is the determined cDNA sequence for clone 63717231.

[0251] SEQ ID NO: 464 is the determined cDNA sequence for clone 63717233.

[0252] SEQ ID NO: 465 is the determined cDNA sequence for clone 63717234.

[0253] SEQ ID NO: 466 is the determined cDNA sequence for clone 63717235.

[0254] SEQ ID NO: 467 is the determined cDNA sequence for clone 63717236.

[0255] SEQ ID NO: 468 is the determined cDNA sequence for clone 63717237.

[0256] SEQ ID NO: 469 is the determined cDNA sequence for clone 63717238.

[0257] SEQ ID NO: 470 is the determined cDNA sequence for clone 63717239.

[0258] SEQ ID NO: 471 is the determined cDNA sequence for clone 63717240.

[0259] SEQ ID NO: 472 is the determined cDNA sequence for clone 63717241.

[0260] SEQ ID NO: 473 is the determined cDNA sequence for clone 63717242.

[0261] SEQ ID NO: 474 is the determined cDNA sequence for clone 63717243.

[0262] SEQ ID NO: 475 is the determined cDNA sequence for clone 63717244.

[0263] SEQ ID NO: 476 is the determined cDNA sequence for clone 63717246.

[0264] SEQ ID NO: 477 is the determined cDNA sequence for clone 63717248.

[0265] SEQ ID NO: 478 is the determined cDNA sequence for clone 63717250.

[0266] SEQ ID NO: 479 is the determined cDNA sequence for clone 63716972.

[0267] SEQ ID NO: 480 is the determined cDNA sequence for clone 63716973.

[0268] SEQ ID NO: 481 is the determined cDNA sequence for clone 63716975.

[0269] SEQ ID NO: 482 is the determined cDNA sequence for clone 63716976.

[0270] SEQ ID NO: 483 is the determined cDNA sequence for clone 63716977.

[0271] SEQ ID NO: 484 is the determined cDNA sequence for clone 63716978.

[0272] SEQ ID NO: 485 is the determined cDNA sequence for clone 63716979.

[0273] SEQ ID NO: 486 is the determined cDNA sequence for clone 63716980.

[0274] SEQ ID NO: 487 is the determined cDNA sequence for clone 63716981.

[0275] SEQ ID NO: 488 is the determined cDNA sequence for clone 63716982.

[0276] SEQ ID NO: 489 is the determined cDNA sequence for clone 63716984.

[0277] SEQ ID NO: 490 is the determined cDNA sequence for clone 63716985.

[0278] SEQ ID NO: 491 is the determined cDNA sequence for clone 63716986.

[0279] SEQ ID NO: 492 is the determined cDNA sequence for clone 63716987.

[0280] SEQ ID NO: 493 is the determined cDNA sequence for clone 63716988.

[0281] SEQ ID NO: 494 is the determined cDNA sequence for clone 63716989.

[0282] SEQ ID NO: 495 is the determined cDNA sequence for clone 63716991.

[0283] SEQ ID NO: 496 is the determined cDNA sequence for clone 63716992.

[0284] SEQ ID NO: 497 is the determined cDNA sequence for clone 63716993.

[0285] SEQ ID NO: 498 is the determined cDNA sequence for clone 63716994.

[0286] SEQ ID NO: 499 is the determined cDNA sequence for clone 63716995.

[0287] SEQ ID NO: 500 is the determined cDNA sequence for clone 63716996.

[0288] SEQ ID NO: 501 is the determined cDNA sequence for clone 63716997.

[0289] SEQ ID NO: 502 is the determined cDNA sequence for clone 63716998.

[0290] SEQ ID NO: 503 is the determined cDNA sequence for clone 63716999.

[0291] SEQ ID NO: 504 is the determined cDNA sequence for clone 63717000.

[0292] SEQ ID NO: 505 is the determined cDNA sequence for clone 63717001.

[0293] SEQ ID NO: 506 is the determined cDNA sequence for clone 63717002.

[0294] SEQ ID NO: 507 is the determined cDNA sequence for clone 63717003.

[0295] SEQ ID NO: 508 is the determined cDNA sequence for clone 63717004.

[0296] SEQ ID NO: 509 is the determined cDNA sequence for clone 63717005.

[0297] SEQ ID NO: 510 is the determined cDNA sequence for clone 63717006.

[0298] SEQ ID NO: 511 is the determined cDNA sequence for clone 63717007.

[0299] SEQ ID NO: 512 is the determined cDNA sequence for clone 63717008.

[0300] SEQ ID NO: 513 is the determined cDNA sequence for clone 63717012.

[0301] SEQ ID NO: 514 is the determined cDNA sequence for clone 63717014.

[0302] SEQ ID NO: 515 is the determined cDNA sequence for clone 63717015.

[0303] SEQ ID NO: 516 is the determined cDNA sequence for clone 63717016.

[0304] SEQ ID NO: 517 is the determined cDNA sequence for clone 63717017.

[0305] SEQ ID NO: 518 is the determined cDNA sequence for clone 63717020.

[0306] SEQ ID NO: 519 is the determined cDNA sequence for clone 63717021.

[0307] SEQ ID NO: 520 is the determined cDNA sequence for clone 63717022.

[0308] SEQ ID NO: 521 is the determined cDNA sequence for clone 63717024.

[0309] SEQ ID NO: 522 is the determined cDNA sequence for clone 63717025.

[0310] SEQ ID NO: 523 is the determined cDNA sequence for clone 63717026.

[0311] SEQ ID NO: 524 is the determined cDNA sequence for clone 63717027.

[0312] SEQ ID NO: 525 is the determined cDNA sequence for clone 63717028.

[0313] SEQ ID NO: 526 is the determined cDNA sequence for clone 63717029.

[0314] SEQ ID NO: 527 is the determined cDNA sequence for clone 63717033.

[0315] SEQ ID NO: 528 is the determined cDNA sequence for clone 63717034.

[0316] SEQ ID NO: 529 is the determined cDNA sequence for clone 63717035.

[0317] SEQ ID NO: 530 is the determined cDNA sequence for clone 63717036.

[0318] SEQ ID NO: 531 is the determined cDNA sequence for clone 63717037.

[0319] SEQ ID NO: 532 is the determined cDNA sequence for clone 63717038.

[0320] SEQ ID NO: 533 is the determined cDNA sequence for clone 63717039.

[0321] SEQ ID NO: 534 is the determined cDNA sequence for clone 63717040.

[0322] SEQ ID NO: 535 is the determined cDNA sequence for clone 63717041.

[0323] SEQ ID NO: 536 is the determined cDNA sequence for clone 63717044.

[0324] SEQ ID NO: 537 is the determined cDNA sequence for clone 63717046.

[0325] SEQ ID NO: 538 is the determined cDNA sequence for clone 63717050.

[0326] SEQ ID NO: 539 is the determined cDNA sequence for clone 63717051.

[0327] SEQ ID NO: 540 is the determined cDNA sequence for clone 63717052.

[0328] SEQ ID NO: 541 is the determined cDNA sequence for clone 63717054.

[0329] SEQ ID NO: 542 is the determined cDNA sequence for clone 63717055.

[0330] SEQ ID NO: 543 is the determined cDNA sequence for clone 63717056.

[0331] SEQ ID NO: 544 is the determined cDNA sequence for clone 63717057.

[0332] SEQ ID NO: 545 is the determined cDNA sequence for clone 63717058.

[0333] SEQ ID NO: 546 is the determined cDNA sequence for clone 63717059.

[0334] SEQ ID NO: 547 is the determined cDNA sequence for clone 63717062.

[0335] SEQ ID NO: 548 is the determined cDNA sequence for clone 63717064.

[0336] SEQ ID NO: 549 is the determined cDNA sequence for clone 63716600.

[0337] SEQ ID NO: 550 is the determined cDNA sequence for clone 63716601.

[0338] SEQ ID NO: 551 is the determined cDNA sequence for clone 63716602.

[0339] SEQ ID NO: 552 is the determined cDNA sequence for clone 63716603.

[0340] SEQ ID NO: 553 is the determined cDNA sequence for clone 63716604.

[0341] SEQ ID NO: 554 is the determined cDNA sequence for clone 63716605.

[0342] SEQ ID NO: 555 is the determined cDNA sequence for clone 63716608.

[0343] SEQ ID NO: 556 is the determined cDNA sequence for clone 63716609.

[0344] SEQ ID NO: 557 is the determined cDNA sequence for clone 63716610.

[0345] SEQ ID NO: 558 is the determined cDNA sequence for clone 63716611.

[0346] SEQ ID NO: 559 is the determined cDNA sequence for clone 63716612.

[0347] SEQ ID NO: 560 is the determined cDNA sequence for clone 63716613.

[0348] SEQ ID NO: 561 is the determined cDNA sequence for clone 63716614.

[0349] SEQ ID NO: 562 is the determined cDNA sequence for clone 63716616.

[0350] SEQ ID NO: 563 is the determined cDNA sequence for clone 63716618.

[0351] SEQ ID NO: 564 is the determined cDNA sequence for clone 63716619.

[0352] SEQ ID NO: 565 is the determined cDNA sequence for clone 63716620.

[0353] SEQ ID NO: 566 is the determined cDNA sequence for clone 63716621.

[0354] SEQ ID NO: 567 is the determined cDNA sequence for clone 63716622.

[0355] SEQ ID NO: 568 is the determined cDNA sequence for clone 63716623.

[0356] SEQ ID NO: 569 is the determined cDNA sequence for clone 63716626.

[0357] SEQ ID NO: 570 is the determined cDNA sequence for clone 63716627.

[0358] SEQ ID NO: 571 is the determined cDNA sequence for clone 63716628.

[0359] SEQ ID NO: 572 is the determined cDNA sequence for clone 63716629.

[0360] SEQ ID NO: 573 is the determined cDNA sequence for clone 63716630.

[0361] SEQ ID NO: 574 is the determined cDNA sequence for clone 63716631.

[0362] SEQ ID NO: 575 is the determined cDNA sequence for clone 63716632.

[0363] SEQ ID NO: 576 is the determined cDNA sequence for clone 63716633.

[0364] SEQ ID NO: 577 is the determined cDNA sequence for clone 63716634.

[0365] SEQ ID NO: 578 is the determined cDNA sequence for clone 63716635.

[0366] SEQ ID NO: 579 is the determined cDNA sequence for clone 63716636.

[0367] SEQ ID NO: 580 is the determined cDNA sequence for clone 63716638.

[0368] SEQ ID NO: 581 is the determined cDNA sequence for clone 63716639.

[0369] SEQ ID NO: 582 is the determined cDNA sequence for clone 63716640.

[0370] SEQ ID NO: 583 is the determined cDNA sequence for clone 63716641.

[0371] SEQ ID NO: 584 is the determined cDNA sequence for clone 63716642.

[0372] SEQ ID NO: 585 is the determined cDNA sequence for clone 63716643.

[0373] SEQ ID NO: 586 is the determined cDNA sequence for clone 63716645.

[0374] SEQ ID NO: 587 is the determined cDNA sequence for clone 63716647.

[0375] SEQ ID NO: 588 is the determined cDNA sequence for clone 63716648.

[0376] SEQ ID NO: 589 is the determined cDNA sequence for clone 63716649.

[0377] SEQ ID NO: 590 is the determined cDNA sequence for clone 63716650.

[0378] SEQ ID NO: 591 is the determined cDNA sequence for clone 63716651.

[0379] SEQ ID NO: 592 is the determined cDNA sequence for clone 63716652.

[0380] SEQ ID NO: 593 is the determined cDNA sequence for clone 63716654.

[0381] SEQ ID NO: 594 is the determined cDNA sequence for clone 63716656.

[0382] SEQ ID NO: 595 is the determined cDNA sequence for clone 63716657.

[0383] SEQ ID NO: 596 is the determined cDNA sequence for clone 63716658.

[0384] SEQ ID NO: 597 is the determined cDNA sequence for clone 63716659.

[0385] SEQ ID NO: 598 is the determined cDNA sequence for clone 63716660.

[0386] SEQ ID NO: 599 is the determined cDNA sequence for clone 63716661.

[0387] SEQ ID NO: 600 is the determined cDNA sequence for clone 63716662.

[0388] SEQ ID NO: 601 is the determined cDNA sequence for clone 63716663.

[0389] SEQ ID NO: 602 is the determined cDNA sequence for clone 63716665.

[0390] SEQ ID NO: 603 is the determined cDNA sequence for clone 63716666.

[0391] SEQ ID NO: 604 is the determined cDNA sequence for clone 63716667.

[0392] SEQ ID NO: 605 is the determined cDNA sequence for clone 63716669.

[0393] SEQ ID NO: 606 is the determined cDNA sequence for clone 63716671.

[0394] SEQ ID NO: 607 is the determined cDNA sequence for clone 63716672.

[0395] SEQ ID NO: 608 is the determined cDNA sequence for clone 63716674.

[0396] SEQ ID NO: 609 is the determined cDNA sequence for clone 63716675.

[0397] SEQ ID NO: 610 is the determined cDNA sequence for clone 63716677.

[0398] SEQ ID NO: 611 is the determined cDNA sequence for clone 63716678.

[0399] SEQ ID NO: 612 is the determined cDNA sequence for clone 63716679.

[0400] SEQ ID NO: 613 is the determined cDNA sequence for clone 63716680.

[0401] SEQ ID NO: 614 is the determined cDNA sequence for clone 63716681.

[0402] SEQ ID NO: 615 is the determined cDNA sequence for clone 63716682.

[0403] SEQ ID NO: 616 is the determined cDNA sequence for clone 63716684.

[0404] SEQ ID NO: 617 is the determined cDNA sequence for clone 63716685.

[0405] SEQ ID NO: 618 is the determined cDNA sequence for clone 63716686.

[0406] SEQ ID NO: 619 is the determined cDNA sequence for clone 63716687.

[0407] SEQ ID NO: 620 is the determined cDNA sequence for clone 63716688.

[0408] SEQ ID NO: 621 is the determined cDNA sequence for clone 63716691.

[0409] SEQ ID NO: 622 is the determined cDNA sequence for clone 63716692.

[0410] SEQ ID NO: 623 is the determined cDNA sequence for clone 63716693.

[0411] SEQ ID NO: 624 is the determined cDNA sequence for clone 63716695.

[0412] SEQ ID NO: 625 is the determined cDNA sequence for clone 63716696.

[0413] SEQ ID NO: 626 is the determined cDNA sequence for clone 63716697.

[0414] SEQ ID NO: 627 is the determined cDNA sequence for clone 63716698.

[0415] SEQ ID NO: 628 is the determined cDNA sequence for clone 63716701.

[0416] SEQ ID NO: 629 is the determined cDNA sequence for clone 63716702.

[0417] SEQ ID NO: 630 is the determined cDNA sequence for clone 63716703.

[0418] SEQ ID NO: 631 is the determined cDNA sequence for clone 63716704.

[0419] SEQ ID NO: 632 is the determined cDNA sequence for clone 63716705.

[0420] SEQ ID NO: 633 is the determined cDNA sequence for clone 63716707.

[0421] SEQ ID NO: 634 is the determined cDNA sequence for clone 63716708.

[0422] SEQ ID NO: 635 is the determined cDNA sequence for clone 63716710.

[0423] SEQ ID NO: 636 is the determined cDNA sequence for clone 63716711.

[0424] SEQ ID NO: 637 is the determined cDNA sequence for clone 63716712.

[0425] SEQ ID NO: 638 is the determined cDNA sequence for clone 63716713.

[0426] SEQ ID NO: 639 is the determined cDNA sequence for clone 63716715.

[0427] SEQ ID NO: 640 is the determined cDNA sequence for clone 63716716.

[0428] SEQ ID NO: 641 is the determined cDNA sequence for clone 63716717.

[0429] SEQ ID NO: 642 is the determined cDNA sequence for clone 63716718.

[0430] SEQ ID NO: 643 is the determined cDNA sequence for clone 63716720.

[0431] SEQ ID NO: 644 is the determined cDNA sequence for clone 63716721.

[0432] SEQ ID NO: 645 is the determined cDNA sequence for clone 63716722.

[0433] SEQ ID NO: 646 is the determined cDNA sequence for clone 63716723.

[0434] SEQ ID NO: 647 is the determined cDNA sequence for clone 63716724.

[0435] SEQ ID NO: 648 is the determined cDNA sequence for clone 63716725.

[0436] SEQ ID NO: 649 is the determined cDNA sequence for clone 63716726.

[0437] SEQ ID NO: 650 is the determined cDNA sequence for clone 63716727.

[0438] SEQ ID NO: 651 is the determined cDNA sequence for clone 63716728.

[0439] SEQ ID NO: 652 is the determined cDNA sequence for clone 63716729.

[0440] SEQ ID NO: 653 is the determined cDNA sequence for clone 63716730.

[0441] SEQ ID NO: 654 is the determined cDNA sequence for clone 63716732.

[0442] SEQ ID NO: 655 is the determined cDNA sequence for clone 63716733.

[0443] SEQ ID NO: 656 is the determined cDNA sequence for clone 63716734.

[0444] SEQ ID NO: 657 is the determined cDNA sequence for clone 63716735.

[0445] SEQ ID NO: 658 is the determined cDNA sequence for clone 63716736.

[0446] SEQ ID NO: 659 is the determined cDNA sequence for clone 63716737.

[0447] SEQ ID NO: 660 is the determined cDNA sequence for clone 63716738.

[0448] SEQ ID NO: 661 is the determined cDNA sequence for clone 63716739.

[0449] SEQ ID NO: 662 is the determined cDNA sequence for clone 63716742.

[0450] SEQ ID NO: 663 is the determined cDNA sequence for clone 63716743.

[0451] SEQ ID NO: 664 is the determined cDNA sequence for clone 63716744.

[0452] SEQ ID NO: 665 is the determined cDNA sequence for clone 63716745.

[0453] SEQ ID NO: 666 is the determined cDNA sequence for clone 63716746.

[0454] SEQ ID NO: 667 is the determined cDNA sequence for clone 63716747.

[0455] SEQ ID NO: 668 is the determined cDNA sequence for clone 63716748.

[0456] SEQ ID NO: 669 is the determined cDNA sequence for clone 63716749.

[0457] SEQ ID NO: 670 is the determined cDNA sequence for clone 63716750.

[0458] SEQ ID NO: 671 is the determined cDNA sequence for clone 63716754.

[0459] SEQ ID NO: 672 is the determined cDNA sequence for clone 63716757.

[0460] SEQ ID NO: 673 is the determined cDNA sequence for clone 63716758.

[0461] SEQ ID NO: 674 is the determined cDNA sequence for clone 63716759.

[0462] SEQ ID NO: 675 is the determined cDNA sequence for clone 63716760.

[0463] SEQ ID NO: 676 is the determined cDNA sequence for clone 63716761.

[0464] SEQ ID NO: 677 is the determined cDNA sequence for clone 63716762.

[0465] SEQ ID NO: 678 is the determined cDNA sequence for clone 63716763.

[0466] SEQ ID NO: 679 is the determined cDNA sequence for clone 63716764.

[0467] SEQ ID NO: 680 is the determined cDNA sequence for clone 63716765.

[0468] SEQ ID NO: 681 is the determined cDNA sequence for clone 63716766.

[0469] SEQ ID NO: 682 is the determined cDNA sequence for clone 63716768.

[0470] SEQ ID NO: 683 is the determined cDNA sequence for clone 63716769.

[0471] SEQ ID NO: 684 is the determined cDNA sequence for clone 63716770.

[0472] SEQ ID NO: 685 is the determined cDNA sequence for clone 63716771.

[0473] SEQ ID NO: 686 is the determined cDNA sequence for clone 63716773.

[0474] SEQ ID NO: 687 is the determined cDNA sequence for clone 63716774.

[0475] SEQ ID NO: 688 is the determined cDNA sequence for clone 63716775.

[0476] SEQ ID NO: 689 is the determined cDNA sequence for clone 63716776.

[0477] SEQ ID NO: 690 is the determined cDNA sequence for clone 63716777.

[0478] SEQ ID NO: 691 is the determined cDNA sequence for clone 63716778.

[0479] SEQ ID NO: 692 is the determined cDNA sequence for clone 63716779.

[0480] SEQ ID NO: 693 is the determined cDNA sequence for clone 63716780.

[0481] SEQ ID NO: 694 is the determined cDNA sequence for clone 63716781.

[0482] SEQ ID NO: 695 is the determined cDNA sequence for clone 63716782.

[0483] SEQ ID NO: 696 is the determined cDNA sequence for clone 63716783.

[0484] SEQ ID NO: 697 is the determined cDNA sequence for clone 63716784.

[0485] SEQ ID NO: 698 is the determined cDNA sequence for clone 63716785.

[0486] SEQ ID NO: 699 is the determined cDNA sequence for clone 63716509.

[0487] SEQ ID NO: 700 is the determined cDNA sequence for clone 63716510.

[0488] SEQ ID NO: 701 is the determined cDNA sequence for clone 63716511.

[0489] SEQ ID NO: 702 is the determined cDNA sequence for clone 63716512.

[0490] SEQ ID NO: 703 is the determined cDNA sequence for clone 63716516.

[0491] SEQ ID NO: 704 is the determined cDNA sequence for clone 63716517.

[0492] SEQ ID NO: 705 is the determined cDNA sequence for clone 63716518.

[0493] SEQ ID NO: 706 is the determined cDNA sequence for clone 63716520.

[0494] SEQ ID NO: 707 is the determined cDNA sequence for clone 63716521.

[0495] SEQ ID NO: 708 is the determined cDNA sequence for clone 63716522.

[0496] SEQ ID NO: 709 is the determined cDNA sequence for clone 63716527.

[0497] SEQ ID NO: 710 is the determined cDNA sequence for clone 63716528.

[0498] SEQ ID NO: 711 is the determined cDNA sequence for clone 63716531.

[0499] SEQ ID NO: 712 is the determined cDNA sequence for clone 63716532.

[0500] SEQ ID NO: 713 is the determined cDNA sequence for clone 63716533.

[0501] SEQ ID NO: 714 is the determined cDNA sequence for clone 63716534.

[0502] SEQ ID NO: 715 is the determined cDNA sequence for clone 63716535.

[0503] SEQ ID NO: 716 is the determined cDNA sequence for clone 63716536.

[0504] SEQ ID NO: 717 is the determined cDNA sequence for clone 63716537.

[0505] SEQ ID NO: 718 is the determined cDNA sequence for clone 63716538.

[0506] SEQ ID NO: 719 is the determined cDNA sequence for clone 63716540.

[0507] SEQ ID NO: 720 is the determined cDNA sequence for clone 63716541.

[0508] SEQ ID NO: 721 is the determined cDNA sequence for clone 63716543.

[0509] SEQ ID NO: 722 is the determined cDNA sequence for clone 63716544.

[0510] SEQ ID NO: 723 is the determined cDNA sequence for clone 63716545.

[0511] SEQ ID NO: 724 is the determined cDNA sequence for clone 63716547.

[0512] SEQ ID NO: 725 is the determined cDNA sequence for clone 63716548.

[0513] SEQ ID NO: 726 is the determined cDNA sequence for clone 63716549.

[0514] SEQ ID NO: 727 is the determined cDNA sequence for clone 63716550.

[0515] SEQ ID NO: 728 is the determined cDNA sequence for clone 63716551.

[0516] SEQ ID NO: 729 is the determined cDNA sequence for clone 63716552.

[0517] SEQ ID NO: 730 is the determined cDNA sequence for clone 63716553.

[0518] SEQ ID NO: 731 is the determined cDNA sequence for clone 63716555.

[0519] SEQ ID NO: 732 is the determined cDNA sequence for clone 63716557.

[0520] SEQ ID NO: 733 is the determined cDNA sequence for clone 63716558.

[0521] SEQ ID NO: 734 is the determined cDNA sequence for clone 63716559.

[0522] SEQ ID NO: 735 is the determined cDNA sequence for clone 63716560.

[0523] SEQ ID NO: 736 is the determined cDNA sequence for clone 63716561.

[0524] SEQ ID NO: 737 is the determined cDNA sequence for clone 63716562.

[0525] SEQ ID NO: 738 is the determined cDNA sequence for clone 63716563.

[0526] SEQ ID NO: 739 is the determined cDNA sequence for clone 63716564.

[0527] SEQ ID NO: 740 is the determined cDNA sequence for clone 63716566.

[0528] SEQ ID NO: 741 is the determined cDNA sequence for clone 63716568.

[0529] SEQ ID NO: 742 is the determined cDNA sequence for clone 63716569.

[0530] SEQ ID NO: 743 is the determined cDNA sequence for clone 63716570.

[0531] SEQ ID NO: 744 is the determined cDNA sequence for clone 63716571.

[0532] SEQ ID NO: 745 is the determined cDNA sequence for clone 63716572.

[0533] SEQ ID NO: 746 is the determined cDNA sequence for clone 63716573.

[0534] SEQ ID NO: 747 is the determined cDNA sequence for clone 63716574.

[0535] SEQ ID NO: 748 is the determined cDNA sequence for clone 63716575.

[0536] SEQ ID NO: 749 is the determined cDNA sequence for clone 63716577.

[0537] SEQ ID NO: 750 is the determined cDNA sequence for clone 63716578.

[0538] SEQ ID NO: 751 is the determined cDNA sequence for clone 63716579.

[0539] SEQ ID NO: 752 is the determined cDNA sequence for clone 63716580.

[0540] SEQ ID NO: 753 is the determined cDNA sequence for clone 63716581.

[0541] SEQ ID NO: 754 is the determined cDNA sequence for clone 63716582.

[0542] SEQ ID NO: 755 is the determined cDNA sequence for clone 63716583.

[0543] SEQ ID NO: 756 is the determined cDNA sequence for clone 63716584.

[0544] SEQ ID NO: 757 is the determined cDNA sequence for clone 63716585.

[0545] SEQ ID NO: 758 is the determined cDNA sequence for clone 63716586.

[0546] SEQ ID NO: 759 is the determined cDNA sequence for clone 63716587.

[0547] SEQ ID NO: 760 is the determined cDNA sequence for clone 63716588.

[0548] SEQ ID NO: 761 is the determined cDNA sequence for clone 63716589.

[0549] SEQ ID NO: 762 is the determined cDNA sequence for clone 63716590.

[0550] SEQ ID NO: 763 is the determined cDNA sequence for clone 63716591.

[0551] SEQ ID NO: 764 is the determined cDNA sequence for clone 63716593.

[0552] SEQ ID NO: 765 is the determined cDNA sequence for clone 63716594.

[0553] SEQ ID NO: 766 is the determined cDNA sequence for clone 63716596.

[0554] SEQ ID NO: 767 is the determined cDNA sequence for clone 63716597.

[0555] SEQ ID NO: 768 is the determined cDNA sequence for clone 63716598.

[0556] SEQ ID NO: 769 is the determined cDNA sequence for clone 63716599.

[0557] SEQ ID NO: 770 is the determined cDNA sequence for clone 63716321.

[0558] SEQ ID NO: 771 is the determined cDNA sequence for clone 63716322.

[0559] SEQ ID NO: 772 is the determined cDNA sequence for clone 63716323.

[0560] SEQ ID NO: 773 is the determined cDNA sequence for clone 63716324.

[0561] SEQ ID NO: 774 is the determined cDNA sequence for clone 63716325.

[0562] SEQ ID NO: 775 is the determined cDNA sequence for clone 63716326.

[0563] SEQ ID NO: 776 is the determined cDNA sequence for clone 63716327.

[0564] SEQ ID NO: 777 is the determined cDNA sequence for clone 63716328.

[0565] SEQ ID NO: 778 is the determined cDNA sequence for clone 63716329.

[0566] SEQ ID NO: 779 is the determined cDNA sequence for clone 63716330.

[0567] SEQ ID NO: 780 is the determined cDNA sequence for clone 63716331.

[0568] SEQ ID NO: 781 is the determined cDNA sequence for clone 63716333.

[0569] SEQ ID NO: 782 is the determined cDNA sequence for clone 63716335.

[0570] SEQ ID NO: 783 is the determined cDNA sequence for clone 63716336.

[0571] SEQ ID NO: 784 is the determined cDNA sequence for clone 63716337.

[0572] SEQ ID NO: 785 is the determined cDNA sequence for clone 63716338.

[0573] SEQ ID NO: 786 is the determined cDNA sequence for clone 63716339.

[0574] SEQ ID NO: 787 is the determined cDNA sequence for clone 63716341.

[0575] SEQ ID NO: 788 is the determined cDNA sequence for clone 63716342.

[0576] SEQ ID NO: 789 is the determined cDNA sequence for clone 63716343.

[0577] SEQ ID NO: 790 is the determined cDNA sequence for clone 63716344.

[0578] SEQ ID NO: 791 is the determined cDNA sequence for clone 63716345.

[0579] SEQ ID NO: 792 is the determined cDNA sequence for clone 63716346.

[0580] SEQ ID NO: 793 is the determined cDNA sequence for clone 63716347.

[0581] SEQ ID NO: 794 is the determined cDNA sequence for clone 63716350.

[0582] SEQ ID NO: 795 is the determined cDNA sequence for clone 63716353.

[0583] SEQ ID NO: 796 is the determined cDNA sequence for clone 63716354.

[0584] SEQ ID NO: 797 is the determined cDNA sequence for clone 63716355.

[0585] SEQ ID NO: 798 is the determined cDNA sequence for clone 63716356.

[0586] SEQ ID NO: 799 is the determined cDNA sequence for clone 63716357.

[0587] SEQ ID NO: 800 is the determined cDNA sequence for clone 63716359.

[0588] SEQ ID NO: 801 is the determined cDNA sequence for clone 63716360.

[0589] SEQ ID NO: 802 is the determined cDNA sequence for clone 63716361.

[0590] SEQ ID NO: 803 is the determined cDNA sequence for clone 63716362.

[0591] SEQ ID NO: 804 is the determined cDNA sequence for clone 63716363.

[0592] SEQ ID NO: 805 is the determined cDNA sequence for clone 63716364.

[0593] SEQ ID NO: 806 is the determined cDNA sequence for clone 63716365.

[0594] SEQ ID NO: 807 is the determined cDNA sequence for clone 63716366.

[0595] SEQ ID NO: 808 is the determined cDNA sequence for clone 63716368.

[0596] SEQ ID NO: 809 is the determined cDNA sequence for clone 63716370.

[0597] SEQ ID NO: 810 is the determined cDNA sequence for clone 63716371.

[0598] SEQ ID NO: 811 is the determined cDNA sequence for clone 63716372.

[0599] SEQ ID NO: 812 is the determined cDNA sequence for clone 63716373.

[0600] SEQ ID NO: 813 is the determined cDNA sequence for clone 63716374.

[0601] SEQ ID NO: 814 is the determined cDNA sequence for clone 63716375.

[0602] SEQ ID NO: 815 is the determined cDNA sequence for clone 63716376.

[0603] SEQ ID NO: 816 is the determined cDNA sequence for clone 63716377.

[0604] SEQ ID NO: 817 is the determined cDNA sequence for clone 63716378.

[0605] SEQ ID NO: 818 is the determined cDNA sequence for clone 63716379.

[0606] SEQ ID NO: 819 is the determined cDNA sequence for clone 63716380.

[0607] SEQ ID NO: 820 is the determined cDNA sequence for clone 63716381.

[0608] SEQ ID NO: 821 is the determined cDNA sequence for clone 63716382.

[0609] SEQ ID NO: 822 is the determined cDNA sequence for clone 63716383.

[0610] SEQ ID NO: 823 is the determined cDNA sequence for clone 63716384.

[0611] SEQ ID NO: 824 is the determined cDNA sequence for clone 63716385.

[0612] SEQ ID NO: 825 is the determined cDNA sequence for clone 63716386.

[0613] SEQ ID NO: 826 is the determined cDNA sequence for clone 63716387.

[0614] SEQ ID NO: 827 is the determined cDNA sequence for clone 63716388.

[0615] SEQ ID NO: 828 is the determined cDNA sequence for clone 63716390.

[0616] SEQ ID NO: 829 is the determined cDNA sequence for clone 63716391.

[0617] SEQ ID NO: 830 is the determined cDNA sequence for clone 63716392.

[0618] SEQ ID NO: 831 is the determined cDNA sequence for clone 63716393.

[0619] SEQ ID NO: 832 is the determined cDNA sequence for clone 63716394.

[0620] SEQ ID NO: 833 is the determined cDNA sequence for clone 63716396.

[0621] SEQ ID NO: 834 is the determined cDNA sequence for clone 63716398.

[0622] SEQ ID NO: 835 is the determined cDNA sequence for clone 63716399.

[0623] SEQ ID NO: 836 is the determined cDNA sequence for clone 63716400.

[0624] SEQ ID NO: 837 is the determined cDNA sequence for clone 63716401.

[0625] SEQ ID NO: 838 is the determined cDNA sequence for clone 63716402.

[0626] SEQ ID NO: 839 is the determined cDNA sequence for clone 63716403.

[0627] SEQ ID NO: 840 is the determined cDNA sequence for clone 63716404.

[0628] SEQ ID NO: 841 is the determined cDNA sequence for clone 63716405.

[0629] SEQ ID NO: 842 is the determined cDNA sequence for clone 63716406.

[0630] SEQ ID NO: 843 is the determined cDNA sequence for clone 63716407.

[0631] SEQ ID NO: 844 is the determined cDNA sequence for clone 63716408.

[0632] SEQ ID NO: 845 is the determined cDNA sequence for clone 63716409.

[0633] SEQ ID NO: 846 is the determined cDNA sequence for clone 63716411.

[0634] SEQ ID NO: 847 is the determined cDNA sequence for clone 63716412.

[0635] SEQ ID NO: 848 is the determined cDNA sequence for clone 63716413.

[0636] SEQ ID NO: 849 is the determined cDNA sequence for clone 63298609.

[0637] SEQ ID NO: 850 is the determined cDNA sequence for clone 63298610.

[0638] SEQ ID NO: 851 is the determined cDNA sequence for clone 63298612.

[0639] SEQ ID NO: 852 is the determined cDNA sequence for clone 63298613.

[0640] SEQ ID NO: 853 is the determined cDNA sequence for clone 63298614.

[0641] SEQ ID NO: 854 is the determined cDNA sequence for clone 63298615.

[0642] SEQ ID NO: 855 is the determined cDNA sequence for clone 63298617.

[0643] SEQ ID NO: 856 is the determined cDNA sequence for clone 63298618.

[0644] SEQ ID NO: 857 is the determined cDNA sequence for clone 63298619.

[0645] SEQ ID NO: 858 is the determined cDNA sequence for clone 63298620.

[0646] SEQ ID NO: 859 is the determined cDNA sequence for clone 63298621.

[0647] SEQ ID NO: 860 is the determined cDNA sequence for clone 63298622.

[0648] SEQ ID NO: 861 is the determined cDNA sequence for clone 63298623.

[0649] SEQ ID NO: 862 is the determined cDNA sequence for clone 63298624.

[0650] SEQ ID NO: 863 is the determined cDNA sequence for clone 63298625.

[0651] SEQ ID NO: 864 is the determined cDNA sequence for clone 63298626.

[0652] SEQ ID NO: 865 is the determined cDNA sequence for clone 63298627.

[0653] SEQ ID NO: 866 is the determined cDNA sequence for clone 63298628.

[0654] SEQ ID NO: 867 is the determined cDNA sequence for clone 63298629.

[0655] SEQ ID NO: 868 is the determined cDNA sequence for clone 63298630.

[0656] SEQ ID NO: 869 is the determined cDNA sequence for clone 63298632.

[0657] SEQ ID NO: 870 is the determined cDNA sequence for clone 63298633.

[0658] SEQ ID NO: 871 is the determined cDNA sequence for clone 63298634.

[0659] SEQ ID NO: 872 is the determined cDNA sequence for clone 63298635.

[0660] SEQ ID NO: 873 is the determined cDNA sequence for clone 63298636.

[0661] SEQ ID NO: 874 is the determined cDNA sequence for clone 63298637.

[0662] SEQ ID NO: 875 is the determined cDNA sequence for clone 63298638.

[0663] SEQ ID NO: 876 is the determined cDNA sequence for clone 63298639.

[0664] SEQ ID NO: 877 is the determined cDNA sequence for clone 63298640.

[0665] SEQ ID NO: 878 is the determined cDNA sequence for clone 63298641.

[0666] SEQ ID NO: 879 is the determined cDNA sequence for clone 63298642.

[0667] SEQ ID NO: 880 is the determined cDNA sequence for clone 63298643.

[0668] SEQ ID NO: 881 is the determined cDNA sequence for clone 63298644.

[0669] SEQ ID NO: 882 is the determined cDNA sequence for clone 63298645.

[0670] SEQ ID NO: 883 is the determined cDNA sequence for clone 63298646.

[0671] SEQ ID NO: 884 is the determined cDNA sequence for clone 63298647.

[0672] SEQ ID NO: 885 is the determined cDNA sequence for clone 63298649.

[0673] SEQ ID NO: 886 is the determined cDNA sequence for clone 63298650.

[0674] SEQ ID NO: 887 is the determined cDNA sequence for clone 63298651.

[0675] SEQ ID NO: 888 is the determined cDNA sequence for clone 63298652.

[0676] SEQ ID NO: 889 is the determined cDNA sequence for clone 63298653.

[0677] SEQ ID NO: 890 is the determined cDNA sequence for clone 63298654.

[0678] SEQ ID NO: 891 is the determined cDNA sequence for clone 63298655.

[0679] SEQ ID NO: 892 is the determined cDNA sequence for clone 63298656.

[0680] SEQ ID NO: 893 is the determined cDNA sequence for clone 63298657.

[0681] SEQ ID NO: 894 is the determined cDNA sequence for clone 63298658.

[0682] SEQ ID NO: 895 is the determined cDNA sequence for clone 63298659.

[0683] SEQ ID NO: 896 is the determined cDNA sequence for clone 63298660.

[0684] SEQ ID NO: 897 is the determined cDNA sequence for clone 63298662.

[0685] SEQ ID NO: 898 is the determined cDNA sequence for clone 63298663.

[0686] SEQ ID NO: 899 is the determined cDNA sequence for clone 63298665.

[0687] SEQ ID NO: 900 is the determined cDNA sequence for clone 63298666.

[0688] SEQ ID NO: 901 is the determined cDNA sequence for clone 63298667.

[0689] SEQ ID NO: 902 is the determined cDNA sequence for clone 63298668.

[0690] SEQ ID NO: 903 is the determined cDNA sequence for clone 63298669.

[0691] SEQ ID NO: 905 is the determined :DNA sequence for clone 63298671.

[0692] SEQ ID NO: 906 is the determined cDNA sequence for clone 63298672.

[0693] SEQ ID NO: 907 is the determined cDNA sequence for clone 63298673.

[0694] SEQ ID NO: 908 is the determined cDNA sequence for clone 63298675.

[0695] SEQ ID NO: 909 is the determined cDNA sequence for clone 63298677.

[0696] SEQ ID NO: 909 is the determined cDNA sequence for clone 63298678.

[0697] SEQ ID NO: 910 is the determined cDNA sequence for clone 63298679.

[0698] SEQ ID NO: 912 is the determined cDNA sequence for clone 63298678.

[0699] SEQ ID NO: 913 is the determined cDNA sequence for clone 63298682.

[0700] SEQ ID NO: 914 is the determined cDNA sequence for clone 63298683.

[0701] SEQ ID NO: 915 is the determined cDNA sequence for clone 63298685.

[0702] SEQ ID NO: 915 is the determined cDNA sequence for clone 63298685.

[0703] SEQ ID NO: 916 is the determined cDNA sequence for clone 63298686.

[0704] SEQ ID NO: 917 is the determined cDNA sequence for clone 63298687.

[0705] SEQ ID NO: 918 is the determined cDNA sequence for clone 63298688.

[0706] SEQ ID NO: 919 is the determined cDNA sequence for clone 63298689.

[0707] SEQ ID NO: 920 is the determined cDNA sequence for clone 63298690.

[0708] SEQ ID NO: 921 is the determined cDNA sequence for clone 63298691.

[0709] SEQ ID NO: 922 is the determined cDNA sequence for clone 63298692.

[0710] SEQ ID NO: 923 is the determined cDNA sequence for clone 63298693.

[0711] SEQ ID NO: 924 is the determined cDNA sequence for clone 63298694.

[0712] SEQ ID NO: 925 is the determined cDNA sequence for clone 63298695.

[0713] SEQ ID NO: 926 is the determined cDNA sequence for clone 63298697.

[0714] SEQ ID NO: 927 is the determined cDNA sequence for clone 63298698.

[0715] SEQ ID NO: 928 is the determined cDNA sequence for clone 63298700.

[0716] SEQ ID NO: 929 is the determined cDNA sequence for clone 63298701.

[0717] SEQ ID NO: 930 is the determined cDNA sequence for clone 63716228.

[0718] SEQ ID NO: 931 is the determined cDNA sequence for clone 63716229.

[0719] SEQ ID NO: 932 is the determined cDNA sequence for clone 63716231.

[0720] SEQ ID NO: 933 is the determined cDNA sequence for clone 63716232.

[0721] SEQ ID NO: 934 is the determined cDNA sequence for clone 63716233.

[0722] SEQ ID NO: 935 is the determined cDNA sequence for clone 63716234.

[0723] SEQ ID NO: 936 is the determined cDNA sequence for clone 63716235.

[0724] SEQ ID NO: 937 is the determined cDNA sequence for clone 63716236.

[0725] SEQ ID NO: 938 is the determined cDNA sequence for clone 63716237.

[0726] SEQ ID NO: 939 is the determined cDNA sequence for clone 63716238.

[0727] SEQ ID NO: 940 is the determined cDNA sequence for clone 63716241.

[0728] SEQ ID NO: 941 is the determined cDNA sequence for clone 63716242.

[0729] SEQ ID NO: 942 is the determined cDNA sequence for clone 63716243.

[0730] SEQ ID NO: 943 is the determined cDNA sequence for clone 63716244.

[0731] SEQ ID NO: 944 is the determined cDNA sequence for clone 63716245.

[0732] SEQ ID NO: 945 is the determined cDNA sequence for clone 63716246.

[0733] SEQ ID NO: 946 is the determined cDNA sequence for clone 63716247.

[0734] SEQ ID NO: 947 is the determined cDNA sequence for clone 63716248.

[0735] SEQ ID NO: 948 is the determined cDNA sequence for clone 63716250.

[0736] SEQ ID NO: 949 is the determined cDNA sequence for clone 63716251.

[0737] SEQ ID NO: 950 is the determined cDNA sequence for clone 63716252.

[0738] SEQ ID NO: 951 is the determined cDNA sequence for clone 63716253.

[0739] SEQ ID NO: 952 is the determined cDNA sequence for clone 63716254.

[0740] SEQ ID NO: 953 is the determined cDNA sequence for clone 63716255.

[0741] SEQ ID NO: 954 is the determined cDNA sequence for clone 63716256.

[0742] SEQ ID NO: 955 is the determined cDNA sequence for clone 63716257.

[0743] SEQ ID NO: 956 is the determined cDNA sequence for clone 63716260.

[0744] SEQ ID NO: 957 is the determined cDNA sequence for clone 63716261.

[0745] SEQ ID NO: 958 is the determined cDNA sequence for clone 63716262.

[0746] SEQ ID NO: 959 is the determined cDNA sequence for clone 63716263.

[0747] SEQ ID NO: 960 is the determined cDNA sequence for clone 63716264.

[0748] SEQ ID NO: 961 is the determined cDNA sequence for clone 63716265.

[0749] SEQ ID NO: 962 is the determined cDNA sequence for clone 63716266.

[0750] SEQ ID NO: 963 is the determined cDNA sequence for clone 63716267.

[0751] SEQ ID NO: 964 is the determined cDNA sequence for clone 63716268.

[0752] SEQ ID NO: 965 is the determined cDNA sequence for clone 63716269.

[0753] SEQ ID NO: 966 is the determined cDNA sequence for clone 63716270.

[0754] SEQ ID NO: 967 is the determined cDNA sequence for clone 63716272.

[0755] SEQ ID NO: 968 is the determined cDNA sequence for clone 63716273.

[0756] SEQ ID NO: 969 is the determined cDNA sequence for clone 63716275.

[0757] SEQ ID NO: 970 is the determined cDNA sequence for clone 63716277.

[0758] SEQ ID NO: 971 is the determined cDNA sequence for clone 63716278.

[0759] SEQ ID NO: 972 is the determined cDNA sequence for clone 63716279.

[0760] SEQ ID NO: 973 is the determined cDNA sequence for clone 63716281.

[0761] SEQ ID NO: 974 is the determined cDNA sequence for clone 63716282.

[0762] SEQ ID NO: 975 is the determined cDNA sequence for clone 63716283.

[0763] SEQ ID NO: 976 is the determined cDNA sequence for clone 63716284.

[0764] SEQ ID NO: 977 is the determined cDNA sequence for clone 63716285.

[0765] SEQ ID NO: 978 is the determined cDNA sequence for clone 63716286.

[0766] SEQ ID NO: 979 is the determined cDNA sequence for clone 63716287.

[0767] SEQ ID NO: 980 is the determined cDNA sequence for clone 63716289.

[0768] SEQ ID NO: 981 is the determined cDNA sequence for clone 63716290.

[0769] SEQ ID NO: 982 is the determined cDNA sequence for clone 63716291.

[0770] SEQ ID NO: 983 is the determined cDNA sequence for clone 63716292.

[0771] SEQ ID NO: 984 is the determined cDNA sequence for clone 63716293.

[0772] SEQ ID NO: 985 is the determined cDNA sequence for clone 63716294.

[0773] SEQ ID NO: 986 is the determined cDNA sequence for clone 63716295.

[0774] SEQ ID NO: 987 is the determined cDNA sequence for clone 63716296.

[0775] SEQ ID NO: 988 is the determined cDNA sequence for clone 63716297.

[0776] SEQ ID NO: 989 is the determined cDNA sequence for clone 63716298.

[0777] SEQ ID NO: 990 is the determined cDNA sequence for clone 63716299.

[0778] SEQ ID NO: 991 is the determined cDNA sequence for clone 63716300.

[0779] SEQ ID NO: 992 is the determined cDNA sequence for clone 63716301.

[0780] SEQ ID NO: 993 is the determined cDNA sequence for clone 63716303.

[0781] SEQ ID NO: 994 is the determined cDNA sequence for clone 63716304.

[0782] SEQ ID NO: 995 is the determined cDNA sequence for clone 63716306.

[0783] SEQ ID NO: 996 is the determined cDNA sequence for clone 63716307.

[0784] SEQ ID NO: 997 is the determined cDNA sequence for clone 63716308.

[0785] SEQ ID NO: 998 is the determined cDNA sequence for clone 63716309.

[0786] SEQ ID NO: 999 is the determined cDNA sequence for clone 63716310.

[0787] SEQ ID NO: 1000 is the determined cDNA sequence for clone 63716311.

[0788] SEQ ID NO: 1001 is the determined cDNA sequence for clone 63716312.

[0789] SEQ ID NO: 1002 is the determined cDNA sequence for clone 63716313.

[0790] SEQ ID NO: 1003 is the determined cDNA sequence for clone 63716314.

[0791] SEQ ID NO: 1004 is the determined cDNA sequence for clone 63716315.

[0792] SEQ ID NO: 1005 is the determined cDNA sequence for clone 63716316.

[0793] SEQ ID NO: 1006 is the determined cDNA sequence for clone 63716317.

[0794] SEQ ID NO: 1007 is the determined cDNA sequence for clone 63716318.

[0795] SEQ ID NO: 1008 is the determined cDNA sequence for clone 63716319.

[0796] SEQ ID NO: 1009 is the determined cDNA sequence for clone 63716320.

[0797] SEQ ID NO: 1010 is the determined cDNA sequence for clone 63751255.

[0798] SEQ ID NO: 1011 is the determined cDNA sequence for clone 63751256.

[0799] SEQ ID NO: 1012 is the determined cDNA sequence for clone 63751259.

[0800] SEQ ID NO: 1013 is the determined cDNA sequence for clone 63751261.

[0801] SEQ ID NO: 1014 is the determined cDNA sequence for clone 63751265.

[0802] SEQ ID NO: 1015 is the determined cDNA sequence for clone 63751266.

[0803] SEQ ID NO: 1016 is the determined cDNA sequence for clone 63751267.

[0804] SEQ ID NO: 1017 is the determined cDNA sequence for clone 63751268.

[0805] SEQ ID NO: 1018 is the determined cDNA sequence for clone 63751269.

[0806] SEQ ID NO: 1019 is the determined cDNA sequence for clone 63751270.

[0807] SEQ ID NO: 1020 is the determined cDNA sequence for clone 63751271.

[0808] SEQ ID NO: 1021 is the determined cDNA sequence for clone 63751272.

[0809] SEQ ID NO: 1022 is the determined cDNA sequence for clone 63751277.

[0810] SEQ ID NO: 1023 is the determined cDNA sequence for clone 63751278.

[0811] SEQ ID NO: 1024 is the determined cDNA sequence for clone 63751279.

[0812] SEQ ID NO: 1025 is the determined cDNA sequence for clone 63751280.

[0813] SEQ ID NO: 1026 is the determined cDNA sequence for clone 63751281.

[0814] SEQ ID NO: 1027 is the determined cDNA sequence for clone 63751283.

[0815] SEQ ID NO: 1028 is the determined cDNA sequence for clone 63751288.

[0816] SEQ ID NO: 1029 is the determined cDNA sequence for clone 63751289.

[0817] SEQ ID NO: 1030 is the determined cDNA sequence for clone 63751290.

[0818] SEQ ID NO: 1031 is the determined cDNA sequence for clone 63751291.

[0819] SEQ ID NO: 1032 is the determined cDNA sequence for clone 63751294.

[0820] SEQ ID NO: 1033 is the determined cDNA sequence for clone 63751295.

[0821] SEQ ID NO: 1034 is the determined cDNA sequence for clone 63751296.

[0822] SEQ ID NO: 1035 is the determined cDNA sequence for clone 63751300.

[0823] SEQ ID NO: 1036 is the determined cDNA sequence for clone 63751301.

[0824] SEQ ID NO: 1037 is the determined cDNA sequence for clone 63751302.

[0825] SEQ ID NO: 1038 is the determined cDNA sequence for clone 63751303.

[0826] SEQ ID NO: 1039 is the determined cDNA sequence for clone 63751304.

[0827] SEQ ID NO: 1040 is the determined cDNA sequence for clone 63751305.

[0828] SEQ ID NO: 1041 is the determined cDNA sequence for clone 63751306.

[0829] SEQ ID NO: 1042 is the determined cDNA sequence for clone 63751307.

[0830] SEQ ID NO: 1043 is the determined cDNA sequence for clone 63751308.

[0831] SEQ ID NO: 1044 is the determined cDNA sequence for clone 63751309.

[0832] SEQ ID NO: 1045 is the determined cDNA sequence for clone 63751312.

[0833] SEQ ID NO: 1046 is the determined cDNA sequence for clone 63751313.

[0834] SEQ ID NO: 1047 is the determined cDNA sequence for clone 63751314.

[0835] SEQ ID NO: 1048 is the determined cDNA sequence for clone 63751315.

[0836] SEQ ID NO: 1049 is the determined cDNA sequence for clone 63751316.

[0837] SEQ ID NO: 1050 is the determined cDNA sequence for clone 63751317.

[0838] SEQ ID NO: 1051 is the determined cDNA sequence for clone 63751318.

[0839] SEQ ID NO: 1052 is the determined cDNA sequence for clone 63751319.

[0840] SEQ ID NO: 1053 is the determined cDNA sequence for clone 63751320.

[0841] SEQ ID NO: 1054 is the determined cDNA sequence for clone 63751321.

[0842] SEQ ID NO: 1055 is the determined cDNA sequence for clone 63751322.

[0843] SEQ ID NO: 1056 is the determined cDNA sequence for clone 63751324.

[0844] SEQ ID NO: 1057 is the determined cDNA sequence for clone 63751325.

[0845] SEQ ID NO: 1058 is the determined cDNA sequence for clone 63751326.

[0846] SEQ ID NO: 1059 is the determined cDNA sequence for clone 63751327.

[0847] SEQ ID NO: 1060 is the determined cDNA sequence for clone 63751328.

[0848] SEQ ID NO: 1061 is the determined cDNA sequence for clone 63751329.

[0849] SEQ ID NO: 1062 is the determined cDNA sequence for clone 63751330.

[0850] SEQ ID NO: 1063 is the determined cDNA sequence for clone 63751331.

[0851] SEQ ID NO: 1064 is the determined cDNA sequence for clone 63751332.

[0852] SEQ ID NO: 1065 is the determined cDNA sequence for clone 63751333.

[0853] SEQ ID NO: 1066 is the determined cDNA sequence for clone 63751334.

[0854] SEQ ID NO: 1067 is the determined cDNA sequence for clone 63751335.

[0855] SEQ ID NO: 1068 is the determined cDNA sequence for clone 63751336.

[0856] SEQ ID NO: 1069 is the determined cDNA sequence for clone 63751337.

[0857] SEQ ID NO: 1070 is the determined cDNA sequence for clone 63751339.

[0858] SEQ ID NO: 1071 is the determined cDNA sequence for clone 63751340.

[0859] SEQ ID NO: 1072 is the determined cDNA sequence for clone 63751341.

[0860] SEQ ID NO: 1073 is the determined cDNA sequence for clone 63751342.

[0861] SEQ ID NO: 1074 is the determined cDNA sequence for clone 63751343.

[0862] SEQ ID NO: 1075 is the determined cDNA sequence for clone 63751344.

[0863] SEQ ID NO: 1076 is the determined cDNA sequence for clone 63751345.

[0864] SEQ ID NO: 1077 is the determined cDNA sequence for clone 63751346.

[0865] SEQ ID NO: 1078 is the determined cDNA sequence for clone 63298704.

[0866] SEQ ID NO: 1079 is the determined cDNA sequence for clone 63298705.

[0867] SEQ ID NO: 1080 is the determined cDNA sequence for clone 63298706.

[0868] SEQ ID NO: 1081 is the determined cDNA sequence for clone 63298707.

[0869] SEQ ID NO: 1082 is the determined cDNA sequence for clone 63298708.

[0870] SEQ ID NO: 1083 is the determined cDNA sequence for clone 63298709.

[0871] SEQ ID NO: 1084 is the determined cDNA sequence for clone 63298710.

[0872] SEQ ID NO: 1085 is the determined cDNA sequence for clone 63298711.

[0873] SEQ ID NO: 1086 is the determined cDNA sequence for clone 63298712.

[0874] SEQ ID NO: 1087 is the determined cDNA sequence for clone 63298714.

[0875] SEQ ID NO: 1088 is the determined cDNA sequence for clone 63298715.

[0876] SEQ ID NO: 1089 is the determined cDNA sequence for clone 63298716.

[0877] SEQ ID NO: 1090 is the determined cDNA sequence for clone 63298717.

[0878] SEQ ID NO: 1091 is the determined cDNA sequence for clone 63298718.

[0879] SEQ ID NO: 1092 is the determined cDNA sequence for clone 63298719.

[0880] SEQ ID NO: 1093 is the determined cDNA sequence for clone 63298720.

[0881] SEQ ID NO: 1094 is the determined cDNA sequence for clone 63298721.

[0882] SEQ ID NO: 1095 is the determined cDNA sequence for clone 63298722.

[0883] SEQ ID NO: 1096 is the determined cDNA sequence for clone 63298723.

[0884] SEQ ID NO: 1097 is the determined cDNA sequence for clone 63298724.

[0885] SEQ ID NO: 1098 is the determined cDNA sequence for clone 63298725.

[0886] SEQ ID NO: 1099 is the determined cDNA sequence for clone 63298726.

[0887] SEQ ID NO: 1100 is the determined cDNA sequence for clone 63298727.

[0888] SEQ ID NO: 1101 is the determined cDNA sequence for clone 63298728.

[0889] SEQ ID NO: 1102 is the determined cDNA sequence for clone 63298729.

[0890] SEQ ID NO: 1103 is the determined cDNA sequence for clone 63298730.

[0891] SEQ ID NO: 1104 is the determined cDNA sequence for clone 63298731.

[0892] SEQ ID NO: 1105 is the determined cDNA sequence for clone 63298732.

[0893] SEQ ID NO: 1106 is the determined cDNA sequence for clone 63298733.

[0894] SEQ ID NO: 1107 is the determined cDNA sequence for clone 63298734.

[0895] SEQ ID NO: 1108 is the determined cDNA sequence for clone 63298735.

[0896] SEQ ID NO: 1109 is the determined cDNA sequence for clone 63298736.

[0897] SEQ ID NO: 1110 is the determined cDNA sequence for clone 63298738.

[0898] SEQ ID NO: 1111 is the determined cDNA sequence for clone 63298739.

[0899] SEQ ID NO: 1112 is the determined cDNA sequence for clone 63298740.

[0900] SEQ ID NO: 1113 is the determined cDNA sequence for clone 63298741.

[0901] SEQ ID NO: 1114 is the determined cDNA sequence for clone 63298742.

[0902] SEQ ID NO: 1115 is the determined cDNA sequence for clone 63298743.

[0903] SEQ ID NO: 1116 is the determined cDNA sequence for clone 63298744.

[0904] SEQ ID NO: 1117 is the determined cDNA sequence for clone 63298745.

[0905] SEQ ID NO: 1118 is the determined cDNA sequence for clone 63298746.

[0906] SEQ ID NO: 1119 is the determined cDNA sequence for clone 63298747.

[0907] SEQ ID NO: 1120 is the determined cDNA sequence for clone 63298748.

[0908] SEQ ID NO: 1121 is the determined cDNA sequence for clone 63298749.

[0909] SEQ ID NO: 1122 is the determined cDNA sequence for clone 63298750.

[0910] SEQ ID NO: 1123 is the determined cDNA sequence for clone 63298751.

[0911] SEQ ID NO: 1124 is the determined cDNA sequence for clone 63298753.

[0912] SEQ ID NO: 1125 is the determined cDNA sequence for clone 63298754.

[0913] SEQ ID NO: 1126 is the determined cDNA sequence for clone 63298755.

[0914] SEQ ID NO: 1127 is the determined cDNA sequence for clone 63298756.

[0915] SEQ ID NO: 1128 is the determined cDNA sequence for clone 63298759.

[0916] SEQ ID NO: 1129 is the determined cDNA sequence for clone 63298761.

[0917] SEQ ID NO: 1130 is the determined cDNA sequence for clone 63298762.

[0918] SEQ ID NO: 1131 is the determined cDNA sequence for clone 63298763.

[0919] SEQ ID NO: 1132 is the determined cDNA sequence for clone 63298764.

[0920] SEQ ID NO: 1133 is the determined cDNA sequence for clone 63298765.

[0921] SEQ ID NO: 1134 is the determined cDNA sequence for clone 63298766.

[0922] SEQ ID NO: 1135 is the determined cDNA sequence for clone 63298767.

[0923] SEQ ID NO: 1136 is the determined cDNA sequence for clone 63298768.

[0924] SEQ ID NO: 1137 is the determined cDNA sequence for clone 63298769.

[0925] SEQ ID NO: 1138 is the determined cDNA sequence for clone 63298770.

[0926] SEQ ID NO: 1139 is the determined cDNA sequence for clone 63298771.

[0927] SEQ ID NO: 1140 is the determined cDNA sequence for clone 63298772.

[0928] SEQ ID NO: 1141 is the determined cDNA sequence for clone 63298774.

[0929] SEQ ID NO: 1142 is the determined cDNA sequence for clone 63298776.

[0930] SEQ ID NO: 1143 is the determined cDNA sequence for clone 63298777.

[0931] SEQ ID NO: 1144 is the determined cDNA sequence for clone 63298778.

[0932] SEQ ID NO: 1145 is the determined cDNA sequence for clone 63298779.

[0933] SEQ ID NO: 1146 is the determined cDNA sequence for clone 63298780.

[0934] SEQ ID NO: 1147 is the determined cDNA sequence for clone 63298781.

[0935] SEQ ID NO: 1148 is the determined cDNA sequence for clone 63298782.

[0936] SEQ ID NO: 1149 is the determined cDNA sequence for clone 63298783.

[0937] SEQ ID NO: 1150 is the determined cDNA sequence for clone 63298786.

[0938] SEQ ID NO: 1151 is the determined cDNA sequence for clone 63298787.

[0939] SEQ ID NO: 1152 is the determined cDNA sequence for clone 63298788.

[0940] SEQ ID NO: 1153 is the determined cDNA sequence for clone 63298789.

[0941] SEQ ID NO: 1154 is the determined cDNA sequence for clone 63298790.

[0942] SEQ ID NO: 1155 is the determined cDNA sequence for clone 63298791.

[0943] SEQ ID NO: 1156 is the determined cDNA sequence for clone 63298792.

[0944] SEQ ID NO: 1157 is the determined cDNA sequence for clone 63298793.

[0945] SEQ ID NO: 1158 is the determined cDNA sequence for clone 63298794.

[0946] SEQ ID NO: 1159 is the determined cDNA sequence for clone 63298981.

[0947] SEQ ID NO: 1160 is the determined cDNA sequence for clone 63298983.

[0948] SEQ ID NO: 1161 is the determined cDNA sequence for clone 63298984.

[0949] SEQ ID NO: 1162 is the determined cDNA sequence for clone 63298985.

[0950] SEQ ID NO: 1163 is the determined cDNA sequence for clone 63298986.

[0951] SEQ ID NO: 1164 is the determined cDNA sequence for clone 63298987.

[0952] SEQ ID NO: 1165 is the determined cDNA sequence for clone 63298988.

[0953] SEQ ID NO: 1166 is the determined cDNA sequence for clone 63298989.

[0954] SEQ ID NO: 1167 is the determined cDNA sequence for clone 63298990.

[0955] SEQ ID NO: 1168 is the determined cDNA sequence for clone 63298991.

[0956] SEQ ID NO: 1169 is the determined cDNA sequence for clone 63298994.

[0957] SEQ ID NO: 1170 is the determined cDNA sequence for clone 63298995.

[0958] SEQ ID NO: 1171 is the determined cDNA sequence for clone 63298997.

[0959] SEQ ID NO: 1172 is the determined cDNA sequence for clone 63298999.

[0960] SEQ ID NO: 1173 is the determined cDNA sequence for clone 63299000.

[0961] SEQ ID NO: 1174 is the determined cDNA sequence for clone 63299001.

[0962] SEQ ID NO: 1175 is the determined cDNA sequence for clone 63299002.

[0963] SEQ ID NO: 1176 is the determined cDNA sequence for clone 63299003.

[0964] SEQ ID NO: 1177 is the determined cDNA sequence for clone 63299004.

[0965] SEQ ID NO: 1178 is the determined cDNA sequence for clone 63299005.

[0966] SEQ ID NO: 1179 is the determined cDNA sequence for clone 63299006.

[0967] SEQ ID NO: 1180 is the determined cDNA sequence for clone 63299008.

[0968] SEQ ID NO: 1181 is the determined cDNA sequence for clone 63299009.

[0969] SEQ ID NO: 1182 is the determined cDNA sequence for clone 63299010.

[0970] SEQ ID NO: 1183 is the determined cDNA sequence for clone 63299011.

[0971] SEQ ID NO: 1184 is the determined cDNA sequence for clone 63299012.

[0972] SEQ ID NO: 1185 is the determined cDNA sequence for clone 63299013.

[0973] SEQ ID NO: 1186 is the determined cDNA sequence for clone 63299014.

[0974] SEQ ID NO: 1187 is the determined cDNA sequence for clone 63299027.

[0975] SEQ ID NO: 1188 is the determined cDNA sequence for clone 63299028.

[0976] SEQ ID NO: 1189 is the determined cDNA sequence for clone 63299029.

[0977] SEQ ID NO: 1190 is the determined cDNA sequence for clone 63299030.

[0978] SEQ ID NO: 1191 is the determined cDNA sequence for clone 63299031.

[0979] SEQ ID NO: 1192 is the determined cDNA sequence for clone 63299032.

[0980] SEQ ID NO: 1193 is the determined cDNA sequence for clone 63299033.

[0981] SEQ ID NO: 1194 is the determined cDNA sequence for clone 63299034.

[0982] SEQ ID NO: 1195 is the determined cDNA sequence for clone 63299035.

[0983] SEQ ID NO: 1196 is the determined cDNA sequence for clone 63299036.

[0984] SEQ ID NO: 1197 is the determined cDNA sequence for clone 63299037.

[0985] SEQ ID NO: 1198 is the determined cDNA sequence for clone 63299038.

[0986] SEQ ID NO: 1199 is the determined cDNA sequence for clone 63299039.

[0987] SEQ ID NO: 1200 is the determined cDNA sequence for clone 63299040.

[0988] SEQ ID NO: 1201 is the determined cDNA sequence for clone 63299042.

[0989] SEQ ID NO: 1202 is the determined cDNA sequence for clone 63299043.

[0990] SEQ ID NO: 1203 is the determined cDNA sequence for clone 63299044.

[0991] SEQ ID NO: 1204 is the determined cDNA sequence for clone 63299045.

[0992] SEQ ID NO: 1205 is the determined cDNA sequence for clone 63299047.

[0993] SEQ ID NO: 1206 is the determined cDNA sequence for clone 63299048.

[0994] SEQ ID NO: 1207 is the determined cDNA sequence for clone 63299051.

[0995] SEQ ID NO: 1208 is the determined cDNA sequence for clone 63299052.

[0996] SEQ ID NO: 1209 is the determined cDNA sequence for clone 63299053.

[0997] SEQ ID NO: 1210 is the determined cDNA sequence for clone 63299055.

[0998] SEQ ID NO: 1211 is the determined cDNA sequence for clone 63299057.

[0999] SEQ ID NO: 1212 is the determined cDNA sequence for clone 63299058.

[1000] SEQ ID NO: 1213 is the determined cDNA sequence for clone 63299059.

[1001] SEQ ID NO: 1214 is the determined cDNA sequence for clone 63299060.

[1002] SEQ ID NO: 1215 is the determined cDNA sequence for clone 63299061.

[1003] SEQ ID NO: 1216 is the determined cDNA sequence for clone 63299062.

[1004] SEQ ID NO: 1217 is the determined cDNA sequence for clone 63299063.

[1005] SEQ ID NO: 1218 is the determined cDNA sequence for clone 63299064.

[1006] SEQ ID NO: 1219 is the determined cDNA sequence for clone 63299065.

[1007] SEQ ID NO: 1220 is the determined cDNA sequence for clone 63299066.

[1008] SEQ ID NO: 1221 is the determined cDNA sequence for clone 63299067.

[1009] SEQ ID NO: 1222 is the determined cDNA sequence for clone 63299070.

[1010] SEQ ID NO: 1223 is the determined cDNA sequence for clone 63299071.

[1011] SEQ ID NO: 1224 is the determined cDNA sequence for clone 63299072.

[1012] SEQ ID NO: 1225 is the determined cDNA sequence for clone 63299073.

[1013] SEQ ID NO: 1226 is the determined cDNA sequence for clone 63717532.

[1014] SEQ ID NO: 1227 is the determined cDNA sequence for clone 63717533.

[1015] SEQ ID NO: 1228 is the determined cDNA sequence for clone 63717535.

[1016] SEQ ID NO: 1229 is the determined cDNA sequence for clone 63717537.

[1017] SEQ ID NO: 1230 is the determined cDNA sequence for clone 63717538.

[1018] SEQ ID NO: 1231 is the determined cDNA sequence for clone 63717539.

[1019] SEQ ID NO: 1232 is the determined cDNA sequence for clone 63717540.

[1020] SEQ ID NO: 1233 is the determined cDNA sequence for clone 63717542.

[1021] SEQ ID NO: 1234 is the determined cDNA sequence for clone 63717543.

[1022] SEQ ID NO: 1235 is the determined cDNA sequence for clone 63717544.

[1023] SEQ ID NO: 1236 is the determined cDNA sequence for clone 63717545.

[1024] SEQ ID NO: 1237 is the determined cDNA sequence for clone 63717546.

[1025] SEQ ID NO: 1238 is the determined cDNA sequence for clone 63717547.

[1026] SEQ ID NO: 1239 is the determined cDNA sequence for clone 63717548.

[1027] SEQ ID NO: 1240 is the determined cDNA sequence for clone 63717549.

[1028] SEQ ID NO: 1241 is the determined cDNA sequence for clone 63717550.

[1029] SEQ ID NO: 1242 is the determined cDNA sequence for clone 63717551.

[1030] SEQ ID NO: 1243 is the determined cDNA sequence for clone 63717552.

[1031] SEQ ID NO: 1244 is the determined cDNA sequence for clone 63717553.

[1032] SEQ ID NO: 1245 is the determined cDNA sequence for clone 63717554.

[1033] SEQ ID NO: 1246 is the determined cDNA sequence for clone 63717555.

[1034] SEQ ID NO: 1247 is the determined cDNA sequence for clone 63717557.

[1035] SEQ ID NO: 1248 is the determined cDNA sequence for clone 63717558.

[1036] SEQ ID NO: 1249 is the determined cDNA sequence for clone 63717559.

[1037] SEQ ID NO: 1250 is the determined cDNA sequence for clone 63717560.

[1038] SEQ ID NO: 1251 is the determined cDNA sequence for clone 63717561.

[1039] SEQ ID NO: 1252 is the determined cDNA sequence for clone 63717562.

[1040] SEQ ID NO: 1253 is the determined cDNA sequence for clone 63717563.

[1041] SEQ ID NO: 1254 is the determined cDNA sequence for clone 63717564.

[1042] SEQ ID NO: 1255 is the determined cDNA sequence for clone 63717565.

[1043] SEQ ID NO: 1256 is the determined cDNA sequence for clone 63717566.

[1044] SEQ ID NO: 1257 is the determined cDNA sequence for clone 63717567.

[1045] SEQ ID NO: 1258 is the determined cDNA sequence for clone 63717568.

[1046] SEQ ID NO: 1259 is the determined cDNA sequence for clone 63717569.

[1047] SEQ ID NO: 1260 is the determined cDNA sequence for clone 63717571.

[1048] SEQ ID NO: 1261 is the determined cDNA sequence for clone 63717572.

[1049] SEQ ID NO: 1262 is the determined cDNA sequence for clone 63717573.

[1050] SEQ ID NO: 1263 is the determined cDNA sequence for clone 63717574.

[1051] SEQ ID NO: 1264 is the determined cDNA sequence for clone 63717575.

[1052] SEQ ID NO: 1265 is the determined cDNA sequence for clone 63717576.

[1053] SEQ ID NO: 1266 is the determined cDNA sequence for clone 63717578.

[1054] SEQ ID NO: 1267 is the determined cDNA sequence for clone 63717579.

[1055] SEQ ID NO: 1268 is the determined cDNA sequence for clone 63717580.

[1056] SEQ ID NO: 1269 is the determined cDNA sequence for clone 63717581.

[1057] SEQ ID NO: 1270 is the determined cDNA sequence for clone 63717582.

[1058] SEQ ID NO: 1271 is the determined cDNA sequence for clone 63717583.

[1059] SEQ ID NO: 1272 is the determined cDNA sequence for clone 63717584.

[1060] SEQ ID NO: 1273 is the determined cDNA sequence for clone 63717586.

[1061] SEQ ID NO: 1274 is the determined cDNA sequence for clone 63717587.

[1062] SEQ ID NO: 1275 is the determined cDNA sequence for clone 63717588.

[1063] SEQ ID NO: 1276 is the determined cDNA sequence for clone 63717589.

[1064] SEQ ID NOs: 1277-1323 are the determined cDNA sequences described in Tables 11 and 12.

[1065] SEQ ID NO: 1324 is the determined cDNA sequence for clone R0639: B04_C882P.

[1066] SEQ ID NO: 1325 is the determined cDNA sequence for clone RO647: A08_Homo.

[1067] SEQ ID NO: 1326 is the determined cDNA sequence for clone RO638: G01_Homo.

[1068] SEQ ID NO: 1327 is the determined cDNA sequence for clone RO637: E03_Homo.

[1069] SEQ ID NO: 1328 is the determined cDNA sequence for clone RO637: E04_C919P.

[1070] SEQ ID NO: 1329 is the determined cDNA sequence for clone RO647: D08_Homo.

[1071] SEQ ID NO: 1330 is the determined cDNA sequence for clone RO639: D12_C968P.

[1072] SEQ ID NO: 1331 is the determined cDNA sequence for clone RO644: C03_C915P.

[1073] SEQ ID NO: 1332 is the determined cDNA sequence for clone RO643: B12_C919P.

[1074] SEQ ID NO: 1333 is the determined cDNA sequence for clone R0641: C09_Homo.

[1075] SEQ ID NO: 1334 is the determined cDNA sequence for clone RO637: H11_Novel.

[1076] SEQ ID NO: 1335 is the determined cDNA sequence for clone R0636: D12_Homo.

[1077] SEQ ID NO: 1336 is the determined cDNA sequence for clone RO638: G10-Homo.

[1078] SEQ ID NO: 1337 is the determined cDNA sequence for clone RO642: G06_Homo.

[1079] SEQ ID NO: 1338 is the determined cDNA sequence for clone R0637: B08_Homo.

[1080] SEQ ID NO: 1339 is the determined cDNA sequence for clone R0636: E09_Homo.

[1081] SEQ ID NO: 1340 is the determined cDNA sequence for clone R0637: B03_Human.

[1082] SEQ ID NO: 1341 is the determined cDNA sequence for clone 637D12_Homo.

[1083] SEQ ID NO: 1342 is the determined cDNA sequence for clone RO642: G04_Homo.

[1084] SEQ ID NO: 1343 is the determined cDNA sequence for clone R0641: G08_Homo.

[1085] SEQ ID NO: 1344 is the determined cDNA sequence for clone R0642: F08_Human.

[1086] SEQ ID NO: 1345 is the determined cDNA sequence for clone RO644: F01_{—}H.sapiens.

[1087] SEQ ID NO: 1346 is the determined cDNA sequence for clone RO637: E06_Homo.

[1088] SEQ ID NO: 1347 is the determined cDNA sequence for clone R0642: G07_Human.

[1089] SEQ ID NO: 1348 is the determined cDNA sequence for clone R0641: C04_Homo.

[1090] SEQ ID NO: 1349 is the determined cDNA sequence for clone R0639: E11_Homo.

[1091] SEQ ID NO: 1350 is the determined cDNA sequence for clone RO641: A06_Homo.

[1092] SEQ ID NO: 1351 is the determined cDNA sequence for clone R0636: F05_Homo.

[1093] SEQ ID NO: 1352 is the determined cDNA sequence for clone R0640: F09_Homo.

[1094] SEQ ID NO: 1353 is the determined cDNA sequence for clone R0643: E06_C882P.

[1095] SEQ ID NO: 1354 is the determined cDNA sequence for clone RO639: H11_Homo.

[1096] SEQ ID NO: 1355 is the determined cDNA sequence for clone R0642: F02_B723P.

[1097] SEQ ID NO: 1356 is the determined cDNA sequence for clone R0644: B_C27E.

[1098] SEQ ID NO: 1357 is the determined cDNA sequence for clone R0644: A12_C882P.

[1099] SEQ ID NO: 1358 is the determined cDNA sequence for clone RO636: D06_Homo.

[1100] SEQ ID NO: 1359 is the determined cDNA sequence for clone R0636: B04_Homo.

[1101] SEQ ID NO: 1360 is the determined cDNA sequence for clone R0641: C07_Novel.

[1102] SEQ ID NO: 1361 is the determined cDNA sequence for clone RO646: H07_H.

[1103] SEQ ID NO: 1362 is the determined cDNA sequence for clone R0641: D01_Novel.

[1104] SEQ ID NO: 1363 is the determined cDNA sequence for clone 70848_B512S.

[1105] SEQ ID NO: 1364 is the determined cDNA sequence for clone 70855_C798P.

[1106] SEQ ID NO: 1365 is the determined cDNA sequence for clone 70875_Homo.

[1107] SEQ ID NO: 1366 is the determined cDNA sequence for clone 70919_Homo.

[1108] SEQ ID NO: 1367 is the determined cDNA sequence for clone 70830_Homo.

[1109] SEQ ID NO: 1368 is the determined cDNA sequence for clone 70847_Homo.

[1110] SEQ ID NO: 1369 is the determined cDNA sequence for clone 70869_Homo.

[1111] SEQ ID NO: 1370 is the determined cDNA sequence for clone 70836_C968P.

[1112] SEQ ID NO: 1371 is the determined cDNA sequence for clone 70849_Novel.

[1113] SEQ ID NO: 1372 is the determined cDNA sequence for clone 70878_Human.

[1114] SEQ ID NO: 1373 is the determined cDNA sequence for clone 70844_Homo.

[1115] SEQ ID NO: 1374 is the determined cDNA sequence for clone 67024.2.

[1116] SEQ ID NO: 1375 is the determined cDNA sequence for clone 65134.2.

[1117] SEQ ID NO: 1376 is the determined cDNA sequence for clone 65328.2.

[1118] SEQ ID NO: 1377 is the determined cDNA sequence for clone 71341.2.

[1119] SEQ ID NO: 1378 is the determined cDNA sequence for clone 70249.2.

[1120] SEQ ID NO: 1379 is the determined cDNA sequence for clone 70254.2.

[1121] SEQ ID NO: 1380 is the determined cDNA sequence for clone 71347.2.

[1122] SEQ ID NO: 1381 is the determined cDNA sequence for clone 71352.2.

[1123] SEQ ID NO: 1382 is the determined cDNA sequence for clone 71353.2.

[1124] SEQ ID NO: 1383 is the determined cDNA sequence for clone 71353.1.

[1125] SEQ ID NO: 1384 is the determined cDNA sequence for clone 71354.2.

[1126] SEQ ID NO: 1385 is the determined cDNA sequence for clone 71355.1.

[1127] SEQ ID NO: 1386 is the determined cDNA sequence for clone 71356.2.

[1128] SEQ ID NO: 1387 is the determined cDNA sequence for clone 71358.2.

[1129] SEQ ID NO: 1388 is the determined cDNA sequence for clone 71362.2.

[1130] SEQ ID NO: 1389 is the determined cDNA sequence for clone 70261.2.

[1131] SEQ ID NO: 1390 is the determined cDNA sequence for clone 71366.2.

[1132] SEQ ID NO: 1391 is the determined cDNA sequence for clone 70263.2.

[1133] SEQ ID NO: 1392 is the determined cDNA sequence for clone 71367.1.

[1134] SEQ ID NO: 1393 is the determined cDNA sequence for clone 71368.1.

[1135] SEQ ID NO: 1394 is the determined cDNA sequence for clone 70265.2.

[1136] SEQ ID NO: 1395 is the determined cDNA sequence for clone 71372.2.

[1137] SEQ ID NO: 1396 is the determined cDNA sequence for clone 71385.2.

[1138] SEQ ID NO: 1397 is the determined cDNA sequence for clone 71388.2.

[1139] SEQ ID NO: 1398 is the determined cDNA sequence for clone 73031.2.

[1140] SEQ ID NO: 1399 is the determined cDNA sequence for clone 73038.2.

[1141] SEQ ID NO: 1400 is the determined cDNA sequence for clone 73044.2.

[1142] SEQ ID NO: 1401 is the determined cDNA sequence for clone 73049.2.

[1143] SEQ ID NO: 1402 is the determined cDNA sequence for clone 73052.2.

[1144] SEQ ID NO: 1403 is the determined cDNA sequence for clone 73058.1.

[1145] SEQ ID NO: 1404 is the determined cDNA sequence for clone 73061.2.

[1146] SEQ ID NO: 1405 is the determined cDNA sequence for clone 73062.2.

[1147] SEQ ID NO: 1406 is the determined cDNA sequence for clone 73068.2.

[1148] SEQ ID NO: 1407 is the determined cDNA sequence for clone 73072.1.

[1149] SEQ ID NO: 1408 is the determined cDNA sequence for clone 73076.2.

[1150] SEQ ID NO: 1409 is the determined cDNA sequence for clone 75425.2.

[1151] SEQ ID NO: 1410 is the determined cDNA sequence for clone 75444.2.

[1152] SEQ ID NO: 1411 is the determined cDNA sequence for clone 75451.2.

[1153] SEQ ID NO: 1412 is the determined cDNA sequence for clone 75456.2.

[1154] SEQ ID NO: 1413 is the determined cDNA sequence for clone 75461.2.

[1155] SEQ ID NO: 1414 is the determined cDNA sequence for clone 75462.2.

[1156] SEQ ID NO: 1415 is the determined cDNA sequence for clone 75465.2.

[1157] SEQ ID NO: 1416 is the determined cDNA sequence for clone 75483.2.

[1158] SEQ ID NO: 1417 is the determined cDNA sequence for clone 75486.2.

[1159] SEQ ID NO: 1418 is the determined cDNA sequence for C634S.

[1160] SEQ ID NO: 1419 is the determined cDNA sequence for C635S.

[1161] SEQ ID NO: 1420 is the determined cDNA sequence for C636S.

[1162] SEQ ID NO: 1421 is the determined cDNA sequence for C637S.

[1163] SEQ ID NO: 1422 is the predicted amino acid sequence of C634S, encoded by the nucleotide sequence set forth in SEQ ID NO: 1418.

[1164] SEQ ID NO: 1423 is the predicted amino acid sequence of C635S, encoded 25 by the nucleotide sequence set forth in SEQ ID NO: 1419.

[1165] SEQ ID NO: 1424 is the predicted amino acid sequence of C637S, encoded by the nucleotide sequence set forth in SEQ ID NO: 1421.

[1166] SEQ ID NO: 1425 is the determined cDNA sequence for C640S.

[1167] SEQ ID NO: 1426 is the predicted amino acid sequence of C640S, encoded by the nucleotide sequence set forth in SEQ ID NO: 1421.

[1168] SEQ ID NO: 1427 is the extended determined cDNA sequence for C636S.

[1169] SEQ ID NO: 1428 is the amino acid sequence of one of the potential ORFs of C636S.

[1170] SEQ ID NO: 1429 is the amino acid sequence of a second potential ORF of C636S.

[1171] SEQ ID NOs: 1430-3417 are the determined cDNA sequences from subtracted colon tumor libraries as described in Examples 12 and 13 and set forth in the table below.

| Sequence Identifier | cDNA Clone No: |
|---|---|
| SEQ ID NO: 1430 | 62116379 |
| SEQ ID NO: 1431 | 62116380 |
| SEQ ID NO: 1432 | 62116381 |
| SEQ ID NO: 1433 | 62116382 |
| SEQ ID NO: 1434 | 62116384 |
| SEQ ID NO: 1435 | 62116385 |
| SEQ ID NO: 1436 | 62116386 |
| SEQ ID NO: 1437 | 62116387 |
| SEQ ID NO: 1438 | 62116388 |
| SEQ ID NO: 1439 | 62116389 |
| SEQ ID NO: 1440 | 62116390 |
| SEQ ID NO: 1441 | 62116391 |
| SEQ ID NO: 1442 | 62116392 |
| SEQ ID NO: 1443 | 62116393 |
| SEQ ID NO: 1444 | 62116395 |
| SEQ ID NO: 1445 | 62116397 |
| SEQ ID NO: 1446 | 62116398 |
| SEQ ID NO: 1447 | 62116399 |
| SEQ ID NO: 1448 | 62116400 |
| SEQ ID NO: 1449 | 62116401 |
| SEQ ID NO: 1450 | 62116403 |
| SEQ ID NO: 1451 | 62116404 |
| SEQ ID NO: 1452 | 62116405 |
| SEQ ID NO: 1453 | 62116406 |
| SEQ ID NO: 1454 | 62116407 |
| SEQ ID NO: 1455 | 62116408 |
| SEQ ID NO: 1456 | 62116409 |
| SEQ ID NO: 1457 | 62116410 |
| SEQ ID NO: 1458 | 62116411 |
| SEQ ID NO: 1459 | 62116412 |
| SEQ ID NO: 1460 | 62116413 |
| SEQ ID NO: 1461 | 62116414 |
| SEQ ID NO: 1462 | 62116415 |
| SEQ ID NO: 1463 | 62116416 |
| SEQ ID NO: 1464 | 62116417 |
| SEQ ID NO: 1465 | 62116418 |
| SEQ ID NO: 1466 | 62116419 |
| SEQ ID NO: 1467 | 62116420 |
| SEQ ID NO: 1468 | 62116422 |
| SEQ ID NO: 1469 | 62116423 |
| SEQ ID NO: 1470 | 62116424 |
| SEQ ID NO: 1471 | 62116425 |
| SEQ ID NO: 1472 | 62116427 |
| SEQ ID NO: 1473 | 62116428 |
| SEQ ID NO: 1474 | 62116429 |
| SEQ ID NO: 1475 | 62116430 |
| SEQ ID NO: 1476 | 62116431 |
| SEQ ID NO: 1477 | 62116432 |
| SEQ ID NO: 1478 | 62116433 |
| SEQ ID NO: 1479 | 62116434 |
| SEQ ID NO: 1480 | 62116435 |
| SEQ ID NO: 1481 | 62116436 |
| SEQ ID NO: 1482 | 62116437 |
| SEQ ID NO: 1483 | 62116438 |
| SEQ ID NO: 1484 | 62116439 |
| SEQ ID NO: 1485 | 62116440 |
| SEQ ID NO: 1486 | 62116441 |
| SEQ ID NO: 1487 | 62116442 |
| SEQ ID NO: 1488 | 62116443 |
| SEQ ID NO: 1489 | 62116444 |
| SEQ ID NO: 1490 | 62116446 |
| SEQ ID NO: 1491 | 62116447 |
| SEQ ID NO: 1492 | 62116448 |
| SEQ ID NO: 1493 | 62116449 |
| SEQ ID NO: 1494 | 62116452 |
| SEQ ID NO: 1495 | 62116453 |
| SEQ ID NO: 1496 | 62116454 |
| SEQ ID NO: 1497 | 62116455 |
| SEQ ID NO: 1498 | 62116456 |
| SEQ ID NO: 1499 | 62116457 |
| SEQ ID NO: 1500 | 62116458 |
| SEQ ID NO: 1501 | 62116460 |
| SEQ ID NO: 1502 | 62116461 |
| SEQ ID NO: 1503 | 62116464 |
| SEQ ID NO: 1504 | 62116465 |
| SEQ ID NO: 1505 | 62116466 |
| SEQ ID NO: 1506 | 62116467 |
| SEQ ID NO: 1507 | 62116468 |
| SEQ ID NO: 1508 | 62116469 |
| SEQ ID NO: 1509 | 62116470 |
| SEQ ID NO: 1510 | 62116471 |
| SEQ ID NO: 1511 | 62108766 |
| SEQ ID NO: 1512 | 62108767 |
| SEQ ID NO: 1513 | 62108769 |
| SEQ ID NO: 1514 | 62108770 |
| SEQ ID NO: 1515 | 62108771 |
| SEQ ID NO: 1516 | 62108772 |
| SEQ ID NO: 1517 | 62108773 |
| SEQ ID NO: 1518 | 62108774 |
| SEQ ID NO: 1519 | 62108775 |
| SEQ ID NO: 1520 | 62108776 |
| SEQ ID NO: 1521 | 62108777 |
| SEQ ID NO: 1522 | 62108778 |
| SEQ ID NO: 1523 | 62108779 |
| SEQ ID NO: 1524 | 62108780 |
| SEQ ID NO: 1525 | 62108781 |
| SEQ ID NO: 1526 | 62108782 |
| SEQ ID NO: 1527 | 62108783 |
| SEQ ID NO: 1528 | 62108784 |
| SEQ ID NO: 1529 | 62108785 |
| SEQ ID NO: 1530 | 62108786 |
| SEQ ID NO: 1531 | 62108787 |
| SEQ ID NO: 1532 | 62108788 |
| SEQ ID NO: 1533 | 62108789 |
| SEQ ID NO: 1534 | 62108790 |
| SEQ ID NO: 1535 | 62108793 |
| SEQ ID NO: 1536 | 62108795 |
| SEQ ID NO: 1537 | 62108796 |
| SEQ ID NO: 1538 | 62108797 |
| SEQ ID NO: 1539 | 62108798 |
| SEQ ID NO: 1540 | 62108799 |
| SEQ ID NO: 1541 | 62108800 |
| SEQ ID NO: 1542 | 62108801 |
| SEQ ID NO: 1543 | 62108802 |
| SEQ ID NO: 1544 | 62108803 |
| SEQ ID NO: 1545 | 62108807 |
| SEQ ID NO: 1546 | 62108809 |
| SEQ ID NO: 1547 | 62108810 |
| SEQ ID NO: 1548 | 62108811 |
| SEQ ID NO: 1549 | 62108812 |
| SEQ ID NO: 1550 | 62108813 |
| SEQ ID NO: 1551 | 62108815 |
| SEQ ID NO: 1552 | 62108817 |
| SEQ ID NO: 1553 | 62108818 |
| SEQ ID NO: 1554 | 62108819 |
| SEQ ID NO: 1555 | 62108820 |
| SEQ ID NO: 1556 | 62108823 |
| SEQ ID NO: 1557 | 62108824 |
| SEQ ID NO: 1558 | 62108825 |
| SEQ ID NO: 1559 | 62108826 |
| SEQ ID NO: 1560 | 62108827 |
| SEQ ID NO: 1561 | 62108828 |
| SEQ ID NO: 1562 | 62108829 |
| SEQ ID NO: 1563 | 62108830 |
| SEQ ID NO: 1564 | 62108831 |
| SEQ ID NO: 1565 | 62108832 |
| SEQ ID NO: 1566 | 62108833 |
| SEQ ID NO: 1567 | 62108834 |
| SEQ ID NO: 1568 | 62108835 |
| SEQ ID NO: 1569 | 62108836 |
| SEQ ID NO: 1570 | 62108837 |
| SEQ ID NO: 1571 | 62108838 |
| SEQ ID NO: 1572 | 62108840 |
| SEQ ID NO: 1573 | 62108841 |
| SEQ ID NO: 1574 | 62108842 |
| SEQ ID NO: 1575 | 62108843 |
| SEQ ID NO: 1576 | 62108844 |
| SEQ ID NO: 1577 | 62108845 |
| SEQ ID NO: 1578 | 62108846 |
| SEQ ID NO: 1579 | 62108847 |
| SEQ ID NO: 1580 | 62108848 |
| SEQ ID NO: 1581 | 62108851 |
| SEQ ID NO: 1582 | 62108852 |
| SEQ ID NO: 1583 | 62108854 |
| SEQ ID NO: 1584 | 62108855 |
| SEQ ID NO: 1585 | 62108856 |
| SEQ ID NO: 1586 | 62108857 |
| SEQ ID NO: 1587 | 62108858 |
| SEQ ID NO: 1588 | 62110627 |
| SEQ ID NO: 1589 | 62110628 |
| SEQ ID NO: 1590 | 62110629 |
| SEQ ID NO: 1591 | 62110630 |
| SEQ ID NO: 1592 | 62110632 |
| SEQ ID NO: 1593 | 62110633 |
| SEQ ID NO: 1594 | 62110634 |
| SEQ ID NO: 1595 | 62110635 |
| SEQ ID NO: 1596 | 62110636 |
| SEQ ID NO: 1597 | 62110637 |
| SEQ ID NO: 1598 | 62110638 |
| SEQ ID NO: 1599 | 62110639 |
| SEQ ID NO: 1600 | 62110641 |
| SEQ ID NO: 1601 | 62110642 |
| SEQ ID NO: 1602 | 62110644 |
| SEQ ID NO: 1603 | 62110645 |
| SEQ ID NO: 1604 | 62110646 |
| SEQ ID NO: 1605 | 62110647 |
| SEQ ID NO: 1606 | 62110648 |
| SEQ ID NO: 1607 | 62110649 |
| SEQ ID NO: 1608 | 62110650 |
| SEQ ID NO: 1609 | 62110651 |
| SEQ ID NO: 1610 | 62110652 |
| SEQ ID NO: 1611 | 62110653 |
| SEQ ID NO: 1612 | 62110654 |
| SEQ ID NO: 1613 | 62110655 |
| SEQ ID NO: 1614 | 62110657 |
| SEQ ID NO: 1615 | 62110658 |
| SEQ ID NO: 1616 | 62110659 |
| SEQ ID NO: 1617 | 62110660 |
| SEQ ID NO: 1618 | 62110661 |
| SEQ ID NO: 1619 | 62110662 |
| SEQ ID NO: 1620 | 62110663 |
| SEQ ID NO: 1621 | 62110664 |
| SEQ ID NO: 1622 | 62110665 |
| SEQ ID NO: 1623 | 62110666 |
| SEQ ID NO: 1624 | 62110667 |
| SEQ ID NO: 1625 | 62110668 |
| SEQ ID NO: 1626 | 62110669 |
| SEQ ID NO: 1627 | 62110670 |
| SEQ ID NO: 1628 | 62110671 |
| SEQ ID NO: 1629 | 62110672 |
| SEQ ID NO: 1630 | 62110673 |
| SEQ ID NO: 1631 | 62110675 |
| SEQ ID NO: 1632 | 62110676 |
| SEQ ID NO: 1633 | 62110679 |
| SEQ ID NO: 1634 | 62110680 |
| SEQ ID NO: 1635 | 62110681 |
| SEQ ID NO: 1636 | 62110682 |
| SEQ ID NO: 1637 | 62110683 |
| SEQ ID NO: 1638 | 62110684 |
| SEQ ID NO: 1639 | 62110685 |
| SEQ ID NO: 1640 | 62110686 |
| SEQ ID NO: 1641 | 62110687 |
| SEQ ID NO: 1642 | 62110689 |
| SEQ ID NO: 1643 | 62110690 |
| SEQ ID NO: 1644 | 62110691 |
| SEQ ID NO: 1645 | 62110693 |
| SEQ ID NO: 1646 | 62110694 |
| SEQ ID NO: 1647 | 62110695 |
| SEQ ID NO: 1648 | 62110696 |
| SEQ ID NO: 1649 | 62110697 |
| SEQ ID NO: 1650 | 62110698 |
| SEQ ID NO: 1651 | 62110699 |
| SEQ ID NO: 1652 | 62110700 |
| SEQ ID NO: 1653 | 62110701 |
| SEQ ID NO: 1654 | 62110702 |
| SEQ ID NO: 1655 | 62110703 |
| SEQ ID NO: 1656 | 62110704 |
| SEQ ID NO: 1657 | 62110705 |
| SEQ ID NO: 1658 | 62110706 |
| SEQ ID NO: 1659 | 62110707 |
| SEQ ID NO: 1660 | 62110708 |
| SEQ ID NO: 1661 | 62110711 |
| SEQ ID NO: 1662 | 62110712 |
| SEQ ID NO: 1663 | 62110714 |
| SEQ ID NO: 1664 | 62110715 |
| SEQ ID NO: 1665 | 62110717 |
| SEQ ID NO: 1666 | 62110718 |
| SEQ ID NO: 1667 | 62116286 |
| SEQ ID NO: 1668 | 62116287 |
| SEQ ID NO: 1669 | 62116288 |
| SEQ ID NO: 1670 | 62116290 |
| SEQ ID NO: 1671 | 62116291 |
| SEQ ID NO: 1672 | 62116292 |
| SEQ ID NO: 1673 | 62116293 |
| SEQ ID NO: 1674 | 62116294 |
| SEQ ID NO: 1675 | 62116295 |
| SEQ ID NO: 1676 | 62116296 |
| SEQ ID NO: 1677 | 62116297 |
| SEQ ID NO: 1678 | 62116298 |
| SEQ ID NO: 1679 | 62116301 |
| SEQ ID NO: 1680 | 62116302 |
| SEQ ID NO: 1681 | 62116303 |
| SEQ ID NO: 1682 | 62116304 |
| SEQ ID NO: 1683 | 62116305 |
| SEQ ID NO: 1684 | 62116306 |
| SEQ ID NO: 1685 | 62116307 |
| SEQ ID NO: 1686 | 62116308 |
| SEQ ID NO: 1687 | 62116309 |
| SEQ ID NO: 1688 | 62116310 |
| SEQ ID NO: 1689 | 62116311 |
| SEQ ID NO: 1690 | 62116312 |
| SEQ ID NO: 1691 | 62116315 |
| SEQ ID NO: 1692 | 62116316 |
| SEQ ID NO: 1693 | 62116317 |
| SEQ ID NO: 1694 | 62116318 |
| SEQ ID NO: 1695 | 62116319 |
| SEQ ID NO: 1696 | 62116321 |
| SEQ ID NO: 1697 | 62116323 |
| SEQ ID NO: 1698 | 62116324 |
| SEQ ID NO: 1699 | 62116325 |
| SEQ ID NO: 1700 | 62116326 |
| SEQ ID NO: 1701 | 62116328 |
| SEQ ID NO: 1702 | 62116329 |
| SEQ ID NO: 1703 | 62116331 |
| SEQ ID NO: 1704 | 62116332 |
| SEQ ID NO: 1705 | 62116333 |
| SEQ ID NO: 1706 | 62116334 |
| SEQ ID NO: 1707 | 62116335 |
| SEQ ID NO: 1708 | 62116336 |
| SEQ ID NO: 1709 | 62116337 |
| SEQ ID NO: 1710 | 62116338 |
| SEQ ID NO: 1711 | 62116339 |
| SEQ ID NO: 1712 | 62116341 |
| SEQ ID NO: 1713 | 62116342 |
| SEQ ID NO: 1714 | 62116343 |
| SEQ ID NO: 1715 | 62116344 |
| SEQ ID NO: 1716 | 62116345 |
| SEQ ID NO: 1717 | 62116347 |
| SEQ ID NO: 1718 | 62116348 |
| SEQ ID NO: 1719 | 62116349 |
| SEQ ID NO: 1720 | 62116350 |
| SEQ ID NO: 1721 | 62116351 |
| SEQ ID NO: 1722 | 62116352 |
| SEQ ID NO: 1723 | 62116353 |
| SEQ ID NO: 1724 | 62116354 |
| SEQ ID NO: 1725 | 62116355 |
| SEQ ID NO: 1726 | 62116356 |
| SEQ ID NO: 1727 | 62116357 |
| SEQ ID NO: 1728 | 62116358 |
| SEQ ID NO: 1729 | 62116359 |
| SEQ ID NO: 1730 | 62116360 |
| SEQ ID NO: 1731 | 62116361 |
| SEQ ID NO: 1732 | 62116362 |
| SEQ ID NO: 1733 | 62116363 |
| SEQ ID NO: 1734 | 62116364 |
| SEQ ID NO: 1735 | 62116365 |
| SEQ ID NO: 1736 | 62116366 |
| SEQ ID NO: 1737 | 62116367 |
| SEQ ID NO: 1738 | 62116368 |
| SEQ ID NO: 1739 | 62116370 |
| SEQ ID NO: 1740 | 62116371 |
| SEQ ID NO: 1741 | 62116372 |
| SEQ ID NO: 1742 | 62116373 |
| SEQ ID NO: 1743 | 62116375 |
| SEQ ID NO: 1744 | 62116376 |
| SEQ ID NO: 1745 | 62116377 |
| SEQ ID NO: 1746 | 62116378 |
| SEQ ID NO: 1747 | 62116565 |
| SEQ ID NO: 1748 | 62116566 |
| SEQ ID NO: 1749 | 62116567 |
| SEQ ID NO: 1750 | 62116568 |
| SEQ ID NO: 1751 | 62116569 |
| SEQ ID NO: 1752 | 62116570 |
| SEQ ID NO: 1753 | 62116571 |
| SEQ ID NO: 1754 | 62116572 |
| SEQ ID NO: 1755 | 62116573 |
| SEQ ID NO: 1756 | 62116574 |
| SEQ ID NO: 1757 | 62116576 |
| SEQ ID NO: 1758 | 62116577 |
| SEQ ID NO: 1759 | 62116579 |
| SEQ ID NO: 1760 | 62116580 |
| SEQ ID NO: 1761 | 62116581 |
| SEQ ID NO: 1762 | 62116582 |
| SEQ ID NO: 1763 | 62116583 |
| SEQ ID NO: 1764 | 62116584 |
| SEQ ID NO: 1765 | 62116585 |
| SEQ ID NO: 1766 | 62116586 |
| SEQ ID NO: 1767 | 62116587 |
| SEQ ID NO: 1768 | 62116588 |
| SEQ ID NO: 1769 | 62116589 |
| SEQ ID NO: 1770 | 62116591 |
| SEQ ID NO: 1771 | 62116593 |
| SEQ ID NO: 1772 | 62116594 |
| SEQ ID NO: 1773 | 62116595 |
| SEQ ID NO: 1774 | 62116596 |
| SEQ ID NO: 1775 | 62116597 |
| SEQ ID NO: 1776 | 62116598 |
| SEQ ID NO: 1777 | 62116599 |
| SEQ ID NO: 1778 | 62116600 |
| SEQ ID NO: 1779 | 62116601 |
| SEQ ID NO: 1780 | 62116602 |
| SEQ ID NO: 1781 | 62116604 |
| SEQ ID NO: 1782 | 62116605 |
| SEQ ID NO: 1783 | 62116606 |
| SEQ ID NO: 1784 | 62116607 |
| SEQ ID NO: 1785 | 62116609 |
| SEQ ID NO: 1786 | 62116610 |
| SEQ ID NO: 1787 | 62116611 |
| SEQ ID NO: 1788 | 62116613 |
| SEQ ID NO: 1789 | 62116614 |
| SEQ ID NO: 1790 | 62116615 |
| SEQ ID NO: 1791 | 62116616 |
| SEQ ID NO: 1792 | 62116617 |
| SEQ ID NO: 1793 | 62116618 |
| SEQ ID NO: 1794 | 62116619 |
| SEQ ID NO: 1795 | 62116620 |
| SEQ ID NO: 1796 | 62116621 |
| SEQ ID NO: 1797 | 62116622 |
| SEQ ID NO: 1798 | 62116623 |
| SEQ ID NO: 1799 | 62116624 |
| SEQ ID NO: 1800 | 62116628 |
| SEQ ID NO: 1801 | 62116629 |
| SEQ ID NO: 1802 | 62116630 |
| SEQ ID NO: 1803 | 62116631 |
| SEQ ID NO: 1804 | 62116632 |
| SEQ ID NO: 1805 | 62116633 |
| SEQ ID NO: 1806 | 62116634 |
| SEQ ID NO: 1807 | 62116635 |
| SEQ ID NO: 1808 | 62116636 |
| SEQ ID NO: 1809 | 62116637 |
| SEQ ID NO: 1810 | 62116638 |
| SEQ ID NO: 1811 | 62116639 |
| SEQ ID NO: 1812 | 62116640 |
| SEQ ID NO: 1813 | 62116642 |
| SEQ ID NO: 1814 | 62116643 |
| SEQ ID NO: 1815 | 62116644 |
| SEQ ID NO: 1816 | 62116645 |
| SEQ ID NO: 1817 | 62116646 |
| SEQ ID NO: 1818 | 62116647 |
| SEQ ID NO: 1819 | 62116648 |
| SEQ ID NO: 1820 | 62116649 |
| SEQ ID NO: 1821 | 62116650 |
| SEQ ID NO: 1822 | 62116652 |
| SEQ ID NO: 1823 | 62116653 |
| SEQ ID NO: 1824 | 62116654 |
| SEQ ID NO: 1825 | 62116655 |
| SEQ ID NO: 1826 | 62116657 |
| SEQ ID NO: 1827 | 62109975 |
| SEQ ID NO: 1828 | 62109976 |
| SEQ ID NO: 1829 | 62109977 |
| SEQ ID NO: 1830 | 62109978 |
| SEQ ID NO: 1831 | 62109980 |
| SEQ ID NO: 1832 | 62109981 |
| SEQ ID NO: 1833 | 62109982 |
| SEQ ID NO: 1834 | 62109983 |
| SEQ ID NO: 1835 | 62109986 |
| SEQ ID NO: 1836 | 62109987 |
| SEQ ID NO: 1837 | 62109988 |
| SEQ ID NO: 1838 | 62109989 |
| SEQ ID NO: 1839 | 62109990 |
| SEQ ID NO: 1840 | 62109992 |
| SEQ ID NO: 1841 | 62109993 |
| SEQ ID NO: 1842 | 62109994 |
| SEQ ID NO: 1843 | 62109995 |
| SEQ ID NO: 1844 | 62109996 |
| SEQ ID NO: 1845 | 62109997 |
| SEQ ID NO: 1846 | 62109998 |
| SEQ ID NO: 1847 | 62109999 |
| SEQ ID NO: 1848 | 62110000 |
| SEQ ID NO: 1849 | 62110001 |
| SEQ ID NO: 1850 | 62110002 |
| SEQ ID NO: 1851 | 62110004 |
| SEQ ID NO: 1852 | 62110005 |
| SEQ ID NO: 1853 | 62110006 |
| SEQ ID NO: 1854 | 62110007 |
| SEQ ID NO: 1855 | 62110010 |
| SEQ ID NO: 1856 | 62110011 |
| SEQ ID NO: 1857 | 62110012 |
| SEQ ID NO: 1858 | 62110013 |
| SEQ ID NO: 1859 | 62110014 |
| SEQ ID NO: 1860 | 62110016 |
| SEQ ID NO: 1861 | 62110017 |
| SEQ ID NO: 1862 | 62110019 |
| SEQ ID NO: 1863 | 62110020 |
| SEQ ID NO: 1864 | 62110021 |
| SEQ ID NO: 1865 | 62110022 |
| SEQ ID NO: 1866 | 62110023 |
| SEQ ID NO: 1867 | 62110024 |
| SEQ ID NO: 1868 | 62110025 |
| SEQ ID NO: 1869 | 62110028 |
| SEQ ID NO: 1870 | 62110029 |
| SEQ ID NO: 1871 | 62110032 |
| SEQ ID NO: 1872 | 62110034 |
| SEQ ID NO: 1873 | 62110035 |
| SEQ ID NO: 1874 | 62110036 |
| SEQ ID NO: 1875 | 62110037 |
| SEQ ID NO: 1876 | 62110038 |
| SEQ ID NO: 1877 | 62110040 |
| SEQ ID NO: 1878 | 62110041 |
| SEQ ID NO: 1879 | 62110042 |
| SEQ ID NO: 1880 | 62110043 |
| SEQ ID NO: 1881 | 62110044 |
| SEQ ID NO: 1882 | 62110045 |
| SEQ ID NO: 1883 | 62110046 |
| SEQ ID NO: 1884 | 62110047 |
| SEQ ID NO: 1885 | 62110048 |
| SEQ ID NO: 1886 | 62110049 |
| SEQ ID NO: 1887 | 62110050 |
| SEQ ID NO: 1888 | 62110052 |
| SEQ ID NO: 1889 | 62110053 |
| SEQ ID NO: 1890 | 62110054 |
| SEQ ID NO: 1891 | 62110056 |
| SEQ ID NO: 1892 | 62110057 |
| SEQ ID NO: 1893 | 62110060 |
| SEQ ID NO: 1894 | 62110061 |
| SEQ ID NO: 1895 | 62110062 |
| SEQ ID NO: 1896 | 62110064 |
| SEQ ID NO: 1897 | 62110065 |
| SEQ ID NO: 1898 | 62110066 |
| SEQ ID NO: 1899 | 62110812 |
| SEQ ID NO: 1900 | 62110813 |
| SEQ ID NO: 1901 | 62110814 |
| SEQ ID NO: 1902 | 62110815 |
| SEQ ID NO: 1903 | 62110816 |
| SEQ ID NO: 1904 | 62110817 |
| SEQ ID NO: 1905 | 62110818 |
| SEQ ID NO: 1906 | 62110819 |
| SEQ ID NO: 1907 | 62110820 |
| SEQ ID NO: 1908 | 62110821 |
| SEQ ID NO: 1909 | 62110823 |
| SEQ ID NO: 1910 | 62110824 |
| SEQ ID NO: 1911 | 62110826 |
| SEQ ID NO: 1912 | 62110827 |
| SEQ ID NO: 1913 | 62110829 |
| SEQ ID NO: 1914 | 62110830 |
| SEQ ID NO: 1915 | 62110832 |
| SEQ ID NO: 1916 | 62110834 |
| SEQ ID NO: 1917 | 62110835 |
| SEQ ID NO: 1918 | 62110836 |
| SEQ ID NO: 1919 | 62110837 |
| SEQ ID NO: 1920 | 62110838 |
| SEQ ID NO: 1921 | 62110839 |
| SEQ ID NO: 1922 | 62110841 |
| SEQ ID NO: 1923 | 62110843 |
| SEQ ID NO: 1924 | 62110845 |
| SEQ ID NO: 1925 | 62110846 |
| SEQ ID NO: 1926 | 62110847 |
| SEQ ID NO: 1927 | 62110848 |
| SEQ ID NO: 1928 | 62110849 |
| SEQ ID NO: 1929 | 62110850 |
| SEQ ID NO: 1930 | 62110851 |
| SEQ ID NO: 1931 | 62110852 |
| SEQ ID NO: 1932 | 62110853 |
| SEQ ID NO: 1933 | 62110854 |
| SEQ ID NO: 1934 | 62110855 |
| SEQ ID NO: 1935 | 62110856 |
| SEQ ID NO: 1936 | 62110859 |
| SEQ ID NO: 1937 | 62110860 |
| SEQ ID NO: 1938 | 62110861 |
| SEQ ID NO: 1939 | 62110862 |
| SEQ ID NO: 1940 | 62110863 |
| SEQ ID NO: 1941 | 62110864 |
| SEQ ID NO: 1942 | 62110865 |
| SEQ ID NO: 1943 | 62110868 |
| SEQ ID NO: 1944 | 62110869 |
| SEQ ID NO: 1945 | 62110870 |
| SEQ ID NO: 1946 | 62110871 |
| SEQ ID NO: 1947 | 62110872 |
| SEQ ID NO: 1948 | 62110873 |
| SEQ ID NO: 1949 | 62110874 |
| SEQ ID NO: 1950 | 62110875 |
| SEQ ID NO: 1951 | 62110876 |
| SEQ ID NO: 1952 | 62110877 |
| SEQ ID NO: 1953 | 62110879 |
| SEQ ID NO: 1954 | 62110880 |
| SEQ ID NO: 1955 | 62110881 |
| SEQ ID NO: 1956 | 62110883 |
| SEQ ID NO: 1957 | 62110884 |
| SEQ ID NO: 1958 | 62110885 |
| SEQ ID NO: 1959 | 62110888 |
| SEQ ID NO: 1960 | 62110889 |
| SEQ ID NO: 1961 | 62110890 |
| SEQ ID NO: 1962 | 62110891 |
| SEQ ID NO: 1963 | 62110892 |
| SEQ ID NO: 1964 | 62110893 |
| SEQ ID NO: 1965 | 62110894 |
| SEQ ID NO: 1966 | 62110896 |
| SEQ ID NO: 1967 | 62110897 |
| SEQ ID NO: 1968 | 62110898 |
| SEQ ID NO: 1969 | 62110899 |
| SEQ ID NO: 1970 | 62110900 |
| SEQ ID NO: 1971 | 62110902 |
| SEQ ID NO: 1972 | 62110903 |
| SEQ ID NO: 1973 | 62110904 |
| SEQ ID NO: 1974 | 62109510 |
| SEQ ID NO: 1975 | 62109511 |
| SEQ ID NO: 1976 | 62109512 |
| SEQ ID NO: 1977 | 62109513 |
| SEQ ID NO: 1978 | 62109514 |
| SEQ ID NO: 1979 | 62109515 |
| SEQ ID NO: 1980 | 62109516 |
| SEQ ID NO: 1981 | 62109517 |
| SEQ ID NO: 1982 | 62109518 |
| SEQ ID NO: 1983 | 62109519 |
| SEQ ID NO: 1984 | 62109520 |
| SEQ ID NO: 1985 | 62109521 |
| SEQ ID NO: 1986 | 62109522 |
| SEQ ID NO: 1987 | 62109523 |
| SEQ ID NO: 1988 | 62109524 |
| SEQ ID NO: 1989 | 62109525 |
| SEQ ID NO: 1990 | 62109526 |
| SEQ ID NO: 1991 | 62109527 |
| SEQ ID NO: 1992 | 62109528 |
| SEQ ID NO: 1993 | 62109529 |
| SEQ ID NO: 1994 | 62109530 |
| SEQ ID NO: 1995 | 62109531 |
| SEQ ID NO: 1996 | 62109532 |
| SEQ ID NO: 1997 | 62109533 |
| SEQ ID NO: 1998 | 62109535 |
| SEQ ID NO: 1999 | 62109536 |
| SEQ ID NO: 2000 | 62109537 |
| SEQ ID NO: 2001 | 62109538 |
| SEQ ID NO: 2002 | 62109539 |
| SEQ ID NO: 2003 | 62109540 |
| SEQ ID NO: 2004 | 62109541 |
| SEQ ID NO: 2005 | 62109542 |
| SEQ ID NO: 2006 | 62109543 |
| SEQ ID NO: 2007 | 62109546 |
| SEQ ID NO: 2008 | 62109547 |
| SEQ ID NO: 2009 | 62109548 |
| SEQ ID NO: 2010 | 62109549 |
| SEQ ID NO: 2011 | 62109550 |
| SEQ ID NO: 2012 | 62109551 |
| SEQ ID NO: 2013 | 62109552 |
| SEQ ID NO: 2014 | 62109553 |
| SEQ ID NO: 2015 | 62109554 |
| SEQ ID NO: 2016 | 62109555 |
| SEQ ID NO: 2017 | 62109556 |
| SEQ ID NO: 2018 | 62109559 |
| SEQ ID NO: 2019 | 62109560 |
| SEQ ID NO: 2020 | 62109561 |
| SEQ ID NO: 2021 | 62109562 |
| SEQ ID NO: 2022 | 62109563 |
| SEQ ID NO: 2023 | 62109565 |
| SEQ ID NO: 2024 | 62109567 |
| SEQ ID NO: 2025 | 62109568 |
| SEQ ID NO: 2026 | 62109569 |
| SEQ ID NO: 2027 | 62109570 |
| SEQ ID NO: 2028 | 62109571 |
| SEQ ID NO: 2029 | 62109572 |
| SEQ ID NO: 2030 | 62109573 |
| SEQ ID NO: 2031 | 62109574 |
| SEQ ID NO: 2032 | 62109575 |
| SEQ ID NO: 2033 | 62109576 |
| SEQ ID NO: 2034 | 62109577 |
| SEQ ID NO: 2035 | 62109579 |
| SEQ ID NO: 2036 | 62109580 |
| SEQ ID NO: 2037 | 62109581 |
| SEQ ID NO: 2038 | 62109582 |
| SEQ ID NO: 2039 | 62109583 |
| SEQ ID NO: 2040 | 62109584 |
| SEQ ID NO: 2041 | 62109585 |
| SEQ ID NO: 2042 | 62109586 |
| SEQ ID NO: 2043 | 62109587 |
| SEQ ID NO: 2044 | 62109588 |
| SEQ ID NO: 2045 | 62109589 |
| SEQ ID NO: 2046 | 62109590 |
| SEQ ID NO: 2047 | 62109591 |
| SEQ ID NO: 2048 | 62109592 |
| SEQ ID NO: 2049 | 62109593 |
| SEQ ID NO: 2050 | 62109594 |
| SEQ ID NO: 2051 | 62109595 |
| SEQ ID NO: 2052 | 62109596 |
| SEQ ID NO: 2053 | 62109597 |
| SEQ ID NO: 2054 | 62109599 |
| SEQ ID NO: 2055 | 62109600 |
| SEQ ID NO: 2056 | 62109601 |
| SEQ ID NO: 2057 | 62109602 |
| SEQ ID NO: 2058 | 62210480 |
| SEQ ID NO: 2059 | 62210481 |
| SEQ ID NO: 2060 | 62210482 |
| SEQ ID NO: 2061 | 62210483 |
| SEQ ID NO: 2062 | 62210484 |
| SEQ ID NO: 2063 | 62210485 |
| SEQ ID NO: 2064 | 62210486 |
| SEQ ID NO: 2065 | 62210487 |
| SEQ ID NO: 2066 | 62210488 |
| SEQ ID NO: 2067 | 62210491 |
| SEQ ID NO: 2068 | 62210492 |
| SEQ ID NO: 2069 | 62210493 |
| SEQ ID NO: 2070 | 62210494 |
| SEQ ID NO: 2071 | 62210495 |
| SEQ ID NO: 2072 | 62210496 |
| SEQ ID NO: 2073 | 62210497 |
| SEQ ID NO: 2074 | 62210498 |
| SEQ ID NO: 2075 | 62210499 |
| SEQ ID NO: 2076 | 62210501 |
| SEQ ID NO: 2077 | 62210502 |
| SEQ ID NO: 2078 | 62210504 |
| SEQ ID NO: 2079 | 62210506 |
| SEQ ID NO: 2080 | 62210507 |
| SEQ ID NO: 2081 | 62210508 |
| SEQ ID NO: 2082 | 62210509 |
| SEQ ID NO: 2083 | 62210510 |
| SEQ ID NO: 2084 | 62210514 |
| SEQ ID NO: 2085 | 62210515 |
| SEQ ID NO: 2086 | 62210516 |
| SEQ ID NO: 2087 | 62210517 |
| SEQ ID NO: 2088 | 62210518 |
| SEQ ID NO: 2089 | 62210519 |
| SEQ ID NO: 2090 | 62210521 |
| SEQ ID NO: 2091 | 62210522 |
| SEQ ID NO: 2092 | 62210523 |
| SEQ ID NO: 2093 | 62210525 |
| SEQ ID NO: 2094 | 62210526 |
| SEQ ID NO: 2095 | 62210527 |
| SEQ ID NO: 2096 | 62210528 |
| SEQ ID NO: 2097 | 62210529 |
| SEQ ID NO: 2098 | 62210530 |
| SEQ ID NO: 2099 | 62210531 |
| SEQ ID NO: 2100 | 62210532 |
| SEQ ID NO: 2101 | 62210533 |
| SEQ ID NO: 2102 | 62210534 |
| SEQ ID NO: 2103 | 62210535 |
| SEQ ID NO: 2104 | 62210536 |
| SEQ ID NO: 2105 | 62210537 |
| SEQ ID NO: 2106 | 62210539 |
| SEQ ID NO: 2107 | 62210541 |
| SEQ ID NO: 2108 | 62210542 |
| SEQ ID NO: 2109 | 62210543 |
| SEQ ID NO: 2110 | 62210544 |
| SEQ ID NO: 2111 | 62210545 |
| SEQ ID NO: 2112 | 62210547 |
| SEQ ID NO: 2113 | 62210548 |
| SEQ ID NO: 2114 | 62210549 |
| SEQ ID NO: 2115 | 62210550 |
| SEQ ID NO: 2116 | 62210551 |
| SEQ ID NO: 2117 | 62210552 |
| SEQ ID NO: 2118 | 62210553 |
| SEQ ID NO: 2119 | 62210554 |
| SEQ ID NO: 2120 | 62210555 |
| SEQ ID NO: 2121 | 62210557 |
| SEQ ID NO: 2122 | 62210559 |
| SEQ ID NO: 2123 | 62210560 |
| SEQ ID NO: 2124 | 62210561 |
| SEQ ID NO: 2125 | 62210562 |
| SEQ ID NO: 2126 | 62210563 |
| SEQ ID NO: 2127 | 62210564 |
| SEQ ID NO: 2128 | 62210565 |
| SEQ ID NO: 2129 | 62210566 |
| SEQ ID NO: 2130 | 62210567 |
| SEQ ID NO: 2131 | 62210568 |
| SEQ ID NO: 2132 | 62210570 |
| SEQ ID NO: 2133 | 62210571 |
| SEQ ID NO: 2134 | 62210572 |
| SEQ ID NO: 2135 | 62333080 |
| SEQ ID NO: 2136 | 62333082 |
| SEQ ID NO: 2137 | 62333083 |
| SEQ ID NO: 2138 | 62333084 |
| SEQ ID NO: 2139 | 62333085 |
| SEQ ID NO: 2140 | 62333087 |
| SEQ ID NO: 2141 | 62333088 |
| SEQ ID NO: 2142 | 62333089 |
| SEQ ID NO: 2143 | 62333090 |
| SEQ ID NO: 2144 | 62333091 |
| SEQ ID NO: 2145 | 62333092 |
| SEQ ID NO: 2146 | 62333093 |
| SEQ ID NO: 2147 | 62333094 |
| SEQ ID NO: 2148 | 62333096 |
| SEQ ID NO: 2149 | 62333097 |
| SEQ ID NO: 2150 | 62333098 |
| SEQ ID NO: 2151 | 62333100 |
| SEQ ID NO: 2152 | 62333101 |
| SEQ ID NO: 2153 | 62333102 |
| SEQ ID NO: 2154 | 62333103 |
| SEQ ID NO: 2155 | 62333104 |
| SEQ ID NO: 2156 | 62333105 |
| SEQ ID NO: 2157 | 62333106 |
| SEQ ID NO: 2158 | 62333107 |
| SEQ ID NO: 2159 | 62333108 |
| SEQ ID NO: 2160 | 62333109 |
| SEQ ID NO: 2161 | 62333110 |
| SEQ ID NO: 2162 | 62333111 |
| SEQ ID NO: 2163 | 62333112 |
| SEQ ID NO: 2164 | 62333113 |
| SEQ ID NO: 2165 | 62333114 |
| SEQ ID NO: 2166 | 62333115 |
| SEQ ID NO: 2167 | 62333116 |
| SEQ ID NO: 2168 | 62333117 |
| SEQ ID NO: 2169 | 62333118 |
| SEQ ID NO: 2170 | 62333119 |
| SEQ ID NO: 2171 | 62333120 |
| SEQ ID NO: 2172 | 62333122 |
| SEQ ID NO: 2173 | 62333123 |
| SEQ ID NO: 2174 | 62333124 |
| SEQ ID NO: 2175 | 62333126 |
| SEQ ID NO: 2176 | 62333127 |
| SEQ ID NO: 2177 | 62333128 |
| SEQ ID NO: 2178 | 62333129 |
| SEQ ID NO: 2179 | 62333130 |
| SEQ ID NO: 2180 | 62333131 |
| SEQ ID NO: 2181 | 62333132 |
| SEQ ID NO: 2182 | 62333133 |
| SEQ ID NO: 2183 | 62333134 |
| SEQ ID NO: 2184 | 62333135 |
| SEQ ID NO: 2185 | 62333137 |
| SEQ ID NO: 2186 | 62333138 |
| SEQ ID NO: 2187 | 62333139 |
| SEQ ID NO: 2188 | 62333141 |
| SEQ ID NO: 2189 | 62333142 |
| SEQ ID NO: 2190 | 62333143 |
| SEQ ID NO: 2191 | 62333145 |
| SEQ ID NO: 2192 | 62333146 |
| SEQ ID NO: 2193 | 62333147 |
| SEQ ID NO: 2194 | 62333148 |
| SEQ ID NO: 2195 | 62333149 |
| SEQ ID NO: 2196 | 62333150 |
| SEQ ID NO: 2197 | 62333152 |
| SEQ ID NO: 2198 | 62333153 |
| SEQ ID NO: 2199 | 62333155 |
| SEQ ID NO: 2200 | 62333157 |
| SEQ ID NO: 2201 | 62333159 |
| SEQ ID NO: 2202 | 62333160 |
| SEQ ID NO: 2203 | 62333161 |
| SEQ ID NO: 2204 | 62333162 |
| SEQ ID NO: 2205 | 62333163 |
| SEQ ID NO: 2206 | 62333164 |
| SEQ ID NO: 2207 | 62333165 |
| SEQ ID NO: 2208 | 62333166 |
| SEQ ID NO: 2209 | 62333168 |
| SEQ ID NO: 2210 | 62333169 |
| SEQ ID NO: 2211 | 62333170 |
| SEQ ID NO: 2212 | 62333171 |
| SEQ ID NO: 2213 | 62333172 |
| SEQ ID NO: 2214 | 62111371 |
| SEQ ID NO: 2215 | 62111372 |
| SEQ ID NO: 2216 | 62111373 |
| SEQ ID NO: 2217 | 62111374 |
| SEQ ID NO: 2218 | 62111375 |
| SEQ ID NO: 2219 | 62111376 |
| SEQ ID NO: 2220 | 62111378 |
| SEQ ID NO: 2221 | 62111380 |
| SEQ ID NO: 2222 | 62111381 |
| SEQ ID NO: 2223 | 62111383 |
| SEQ ID NO: 2224 | 62111384 |
| SEQ ID NO: 2225 | 62111385 |
| SEQ ID NO: 2226 | 62111386 |
| SEQ ID NO: 2227 | 62111387 |
| SEQ ID NO: 2228 | 62111388 |
| SEQ ID NO: 2229 | 62111389 |
| SEQ ID NO: 2230 | 62111390 |
| SEQ ID NO: 2231 | 62111391 |
| SEQ ID NO: 2232 | 62111392 |
| SEQ ID NO: 2233 | 62111393 |
| SEQ ID NO: 2234 | 62111394 |
| SEQ ID NO: 2235 | 62111395 |
| SEQ ID NO: 2236 | 62111396 |
| SEQ ID NO: 2237 | 62111397 |
| SEQ ID NO: 2238 | 62111398 |
| SEQ ID NO: 2239 | 62111400 |
| SEQ ID NO: 2240 | 62111403 |
| SEQ ID NO: 2241 | 62111404 |
| SEQ ID NO: 2242 | 62111405 |
| SEQ ID NO: 2243 | 62111406 |
| SEQ ID NO: 2244 | 62111407 |
| SEQ ID NO: 2245 | 62111409 |
| SEQ ID NO: 2246 | 62111410 |
| SEQ ID NO: 2247 | 62111411 |
| SEQ ID NO: 2248 | 62111412 |
| SEQ ID NO: 2249 | 62111413 |
| SEQ ID NO: 2250 | 62111414 |
| SEQ ID NO: 2251 | 62111415 |
| SEQ ID NO: 2252 | 62111417 |
| SEQ ID NO: 2253 | 62111418 |
| SEQ ID NO: 2254 | 62111419 |
| SEQ ID NO: 2255 | 62111420 |
| SEQ ID NO: 2256 | 62111421 |
| SEQ ID NO: 2257 | 62111422 |
| SEQ ID NO: 2258 | 62111423 |
| SEQ ID NO: 2259 | 62111424 |
| SEQ ID NO: 2260 | 62111425 |
| SEQ ID NO: 2261 | 62111426 |
| SEQ ID NO: 2262 | 62111427 |
| SEQ ID NO: 2263 | 62111428 |
| SEQ ID NO: 2264 | 62111429 |
| SEQ ID NO: 2265 | 62111430 |
| SEQ ID NO: 2266 | 62111431 |
| SEQ ID NO: 2267 | 62111432 |
| SEQ ID NO: 2268 | 62111433 |
| SEQ ID NO: 2269 | 62111434 |
| SEQ ID NO: 2270 | 62111435 |
| SEQ ID NO: 2271 | 62111437 |
| SEQ ID NO: 2272 | 62111438 |
| SEQ ID NO: 2273 | 62111439 |
| SEQ ID NO: 2274 | 62111440 |
| SEQ ID NO: 2275 | 62111441 |
| SEQ ID NO: 2276 | 62111442 |
| SEQ ID NO: 2277 | 62111443 |
| SEQ ID NO: 2278 | 62111444 |
| SEQ ID NO: 2279 | 62111445 |
| SEQ ID NO: 2280 | 62111446 |
| SEQ ID NO: 2281 | 62111448 |
| SEQ ID NO: 2282 | 62111450 |
| SEQ ID NO: 2283 | 62111451 |
| SEQ ID NO: 2284 | 62111452 |
| SEQ ID NO: 2285 | 62111453 |
| SEQ ID NO: 2286 | 62111455 |
| SEQ ID NO: 2287 | 62111456 |
| SEQ ID NO: 2288 | 62111457 |
| SEQ ID NO: 2289 | 62111458 |
| SEQ ID NO: 2290 | 62111459 |
| SEQ ID NO: 2291 | 62111460 |
| SEQ ID NO: 2292 | 62111461 |
| SEQ ID NO: 2293 | 62111462 |
| SEQ ID NO: 2294 | 62110161 |
| SEQ ID NO: 2295 | 62110162 |
| SEQ ID NO: 2296 | 62110163 |
| SEQ ID NO: 2297 | 62110164 |
| SEQ ID NO: 2298 | 62110165 |
| SEQ ID NO: 2299 | 62110166 |
| SEQ ID NO: 2300 | 62110167 |
| SEQ ID NO: 2301 | 62110168 |
| SEQ ID NO: 2302 | 62110171 |
| SEQ ID NO: 2303 | 62110172 |
| SEQ ID NO: 2304 | 62110174 |
| SEQ ID NO: 2305 | 62110175 |
| SEQ ID NO: 2306 | 62110176 |
| SEQ ID NO: 2307 | 62110178 |
| SEQ ID NO: 2308 | 62110179 |
| SEQ ID NO: 2309 | 62110180 |
| SEQ ID NO: 2310 | 62110183 |
| SEQ ID NO: 2311 | 62110184 |
| SEQ ID NO: 2312 | 62110185 |
| SEQ ID NO: 2313 | 62110186 |
| SEQ ID NO: 2314 | 62110187 |
| SEQ ID NO: 2315 | 62110188 |
| SEQ ID NO: 2316 | 62110189 |
| SEQ ID NO: 2317 | 62110190 |
| SEQ ID NO: 2318 | 62110191 |
| SEQ ID NO: 2319 | 62110195 |
| SEQ ID NO: 2320 | 62110196 |
| SEQ ID NO: 2321 | 62110197 |
| SEQ ID NO: 2322 | 62110199 |
| SEQ ID NO: 2323 | 62110200 |
| SEQ ID NO: 2324 | 62110201 |
| SEQ ID NO: 2325 | 62110202 |
| SEQ ID NO: 2326 | 62110204 |
| SEQ ID NO: 2327 | 62110208 |
| SEQ ID NO: 2328 | 62110209 |
| SEQ ID NO: 2329 | 62110210 |
| SEQ ID NO: 2330 | 62110211 |
| SEQ ID NO: 2331 | 62110212 |
| SEQ ID NO: 2332 | 62110213 |
| SEQ ID NO: 2333 | 62110214 |
| SEQ ID NO: 2334 | 62110216 |
| SEQ ID NO: 2335 | 62110217 |
| SEQ ID NO: 2336 | 62110218 |
| SEQ ID NO: 2337 | 62110219 |
| SEQ ID NO: 2338 | 62110220 |
| SEQ ID NO: 2339 | 62110221 |
| SEQ ID NO: 2340 | 62110222 |
| SEQ ID NO: 2341 | 62110223 |
| SEQ ID NO: 2342 | 62110224 |
| SEQ ID NO: 2343 | 62110226 |
| SEQ ID NO: 2344 | 62110228 |
| SEQ ID NO: 2345 | 62110231 |
| SEQ ID NO: 2346 | 62110232 |
| SEQ ID NO: 2347 | 62110233 |
| SEQ ID NO: 2348 | 62110234 |
| SEQ ID NO: 2349 | 62110235 |
| SEQ ID NO: 2350 | 62110236 |
| SEQ ID NO: 2351 | 62110238 |
| SEQ ID NO: 2352 | 62110239 |
| SEQ ID NO: 2353 | 62110240 |
| SEQ ID NO: 2354 | 62110241 |
| SEQ ID NO: 2355 | 62110244 |
| SEQ ID NO: 2356 | 62110245 |
| SEQ ID NO: 2357 | 62110246 |
| SEQ ID NO: 2358 | 62110247 |
| SEQ ID NO: 2359 | 62110248 |
| SEQ ID NO: 2360 | 62110250 |
| SEQ ID NO: 2361 | 62110251 |
| SEQ ID NO: 2362 | 62110252 |
| SEQ ID NO: 2363 | 62211565 |
| SEQ ID NO: 2364 | 62211566 |
| SEQ ID NO: 2365 | 62211567 |
| SEQ ID NO: 2366 | 62211568 |
| SEQ ID NO: 2367 | 62211569 |
| SEQ ID NO: 2368 | 62211570 |
| SEQ ID NO: 2369 | 62211572 |
| SEQ ID NO: 2370 | 62211575 |
| SEQ ID NO: 2371 | 62211576 |
| SEQ ID NO: 2372 | 62211577 |
| SEQ ID NO: 2373 | 62211578 |
| SEQ ID NO: 2374 | 62211579 |
| SEQ ID NO: 2375 | 62211580 |
| SEQ ID NO: 2376 | 62211581 |
| SEQ ID NO: 2377 | 62211582 |
| SEQ ID NO: 2378 | 62211583 |
| SEQ ID NO: 2379 | 62211584 |
| SEQ ID NO: 2380 | 62211585 |
| SEQ ID NO: 2381 | 62211586 |
| SEQ ID NO: 2382 | 62211587 |
| SEQ ID NO: 2383 | 62211588 |
| SEQ ID NO: 2384 | 62211589 |
| SEQ ID NO: 2385 | 62211590 |
| SEQ ID NO: 2386 | 62211591 |
| SEQ ID NO: 2387 | 62211594 |
| SEQ ID NO: 2388 | 62211595 |
| SEQ ID NO: 2389 | 62211596 |
| SEQ ID NO: 2390 | 62211599 |
| SEQ ID NO: 2391 | 62211600 |
| SEQ ID NO: 2392 | 62211601 |
| SEQ ID NO: 2393 | 62211603 |
| SEQ ID NO: 2394 | 62211604 |
| SEQ ID NO: 2395 | 62211605 |
| SEQ ID NO: 2396 | 62211606 |
| SEQ ID NO: 2397 | 62211608 |
| SEQ ID NO: 2398 | 62211609 |
| SEQ ID NO: 2399 | 62211610 |
| SEQ ID NO: 2400 | 62211611 |
| SEQ ID NO: 2401 | 62211612 |
| SEQ ID NO: 2402 | 62211613 |
| SEQ ID NO: 2403 | 62211614 |
| SEQ ID NO: 2404 | 62211615 |
| SEQ ID NO: 2405 | 62211616 |
| SEQ ID NO: 2406 | 62211617 |
| SEQ ID NO: 2407 | 62211618 |
| SEQ ID NO: 2408 | 62211619 |
| SEQ ID NO: 2409 | 62211620 |
| SEQ ID NO: 2410 | 62211621 |
| SEQ ID NO: 2411 | 62211622 |
| SEQ ID NO: 2412 | 62211623 |
| SEQ ID NO: 2413 | 62211624 |
| SEQ ID NO: 2414 | 62211626 |
| SEQ ID NO: 2415 | 62211627 |
| SEQ ID NO: 2416 | 62211629 |
| SEQ ID NO: 2417 | 62211630 |
| SEQ ID NO: 2418 | 62211632 |
| SEQ ID NO: 2419 | 62211633 |
| SEQ ID NO: 2420 | 62211634 |
| SEQ ID NO: 2421 | 62211635 |
| SEQ ID NO: 2422 | 62211637 |
| SEQ ID NO: 2423 | 62211638 |
| SEQ ID NO: 2424 | 62211639 |
| SEQ ID NO: 2425 | 62211640 |
| SEQ ID NO: 2426 | 62211641 |
| SEQ ID NO: 2427 | 62211642 |
| SEQ ID NO: 2428 | 62211644 |
| SEQ ID NO: 2429 | 62211645 |
| SEQ ID NO: 2430 | 62211646 |
| SEQ ID NO: 2431 | 62211647 |
| SEQ ID NO: 2432 | 62211648 |
| SEQ ID NO: 2433 | 62211649 |
| SEQ ID NO: 2434 | 62211650 |
| SEQ ID NO: 2435 | 62211651 |
| SEQ ID NO: 2436 | 62211652 |
| SEQ ID NO: 2437 | 62211654 |
| SEQ ID NO: 2438 | 62211655 |
| SEQ ID NO: 2439 | 62211656 |
| SEQ ID NO: 2440 | 63717126 |
| SEQ ID NO: 2441 | 63717127 |
| SEQ ID NO: 2442 | 63717128 |
| SEQ ID NO: 2443 | 63717129 |
| SEQ ID NO: 2444 | 63717130 |
| SEQ ID NO: 2445 | 63717131 |
| SEQ ID NO: 2446 | 63717132 |
| SEQ ID NO: 2447 | 63717133 |
| SEQ ID NO: 2448 | 63717134 |
| SEQ ID NO: 2449 | 63717135 |
| SEQ ID NO: 2450 | 63717136 |
| SEQ ID NO: 2451 | 63717137 |
| SEQ ID NO: 2452 | 63717138 |
| SEQ ID NO: 2453 | 63717139 |
| SEQ ID NO: 2454 | 63717141 |
| SEQ ID NO: 2455 | 63717143 |
| SEQ ID NO: 2456 | 63717145 |
| SEQ ID NO: 2457 | 63717146 |
| SEQ ID NO: 2458 | 63717147 |
| SEQ ID NO: 2459 | 63717148 |
| SEQ ID NO: 2460 | 63717149 |
| SEQ ID NO: 2461 | 63717152 |
| SEQ ID NO: 2462 | 63717153 |
| SEQ ID NO: 2463 | 63717155 |
| SEQ ID NO: 2464 | 63717156 |
| SEQ ID NO: 2465 | 63717157 |
| SEQ ID NO: 2466 | 63534218 |
| SEQ ID NO: 2467 | 63534219 |
| SEQ ID NO: 2468 | 63534220 |
| SEQ ID NO: 2469 | 63534221 |
| SEQ ID NO: 2470 | 63534222 |
| SEQ ID NO: 2471 | 63534223 |
| SEQ ID NO: 2472 | 63534224 |
| SEQ ID NO: 2473 | 63534225 |
| SEQ ID NO: 2474 | 63534226 |
| SEQ ID NO: 2475 | 63534227 |
| SEQ ID NO: 2476 | 63534228 |
| SEQ ID NO: 2477 | 63534229 |
| SEQ ID NO: 2478 | 63534230 |
| SEQ ID NO: 2479 | 63534232 |
| SEQ ID NO: 2480 | 63534233 |
| SEQ ID NO: 2481 | 63534234 |
| SEQ ID NO: 2482 | 63534235 |
| SEQ ID NO: 2483 | 63534236 |
| SEQ ID NO: 2484 | 63534237 |
| SEQ ID NO: 2485 | 63534238 |
| SEQ ID NO: 2486 | 63534239 |
| SEQ ID NO: 2487 | 63534241 |
| SEQ ID NO: 2488 | 63534242 |
| SEQ ID NO: 2489 | 63534243 |
| SEQ ID NO: 2490 | 63534244 |
| SEQ ID NO: 2491 | 63534245 |
| SEQ ID NO: 2492 | 63534247 |
| SEQ ID NO: 2493 | 63534248 |
| SEQ ID NO: 2494 | 63534249 |
| SEQ ID NO: 2495 | 63534251 |
| SEQ ID NO: 2496 | 63534253 |
| SEQ ID NO: 2497 | 63534256 |
| SEQ ID NO: 2498 | 63534257 |
| SEQ ID NO: 2499 | 63534259 |
| SEQ ID NO: 2500 | 63534260 |
| SEQ ID NO: 2501 | 63534261 |
| SEQ ID NO: 2502 | 63534263 |
| SEQ ID NO: 2503 | 63534264 |
| SEQ ID NO: 2504 | 63534265 |
| SEQ ID NO: 2505 | 63534266 |
| SEQ ID NO: 2506 | 63534267 |
| SEQ ID NO: 2507 | 63534268 |
| SEQ ID NO: 2508 | 63534269 |
| SEQ ID NO: 2509 | 63534270 |
| SEQ ID NO: 2510 | 63534271 |
| SEQ ID NO: 2511 | 63534272 |
| SEQ ID NO: 2512 | 63534273 |
| SEQ ID NO: 2513 | 63534274 |
| SEQ ID NO: 2514 | 63534275 |
| SEQ ID NO: 2515 | 63534276 |
| SEQ ID NO: 2516 | 63534277 |
| SEQ ID NO: 2517 | 63534282 |
| SEQ ID NO: 2518 | 63534283 |
| SEQ ID NO: 2519 | 63534284 |
| SEQ ID NO: 2520 | 63534285 |
| SEQ ID NO: 2521 | 63534286 |
| SEQ ID NO: 2522 | 63534287 |
| SEQ ID NO: 2523 | 63534288 |
| SEQ ID NO: 2524 | 63534289 |
| SEQ ID NO: 2525 | 63534290 |
| SEQ ID NO: 2526 | 63534292 |
| SEQ ID NO: 2527 | 63534293 |
| SEQ ID NO: 2528 | 63534294 |
| SEQ ID NO: 2529 | 63534295 |
| SEQ ID NO: 2530 | 63534296 |
| SEQ ID NO: 2531 | 63534297 |
| SEQ ID NO: 2532 | 63534299 |
| SEQ ID NO: 2533 | 63534301 |
| SEQ ID NO: 2534 | 63534302 |
| SEQ ID NO: 2535 | 63534305 |
| SEQ ID NO: 2536 | 63534306 |
| SEQ ID NO: 2537 | 63534307 |
| SEQ ID NO: 2538 | 63534308 |
| SEQ ID NO: 2539 | 63534309 |
| SEQ ID NO: 2540 | 63534310 |
| SEQ ID NO: 2541 | 63608076 |
| SEQ ID NO: 2542 | 63608077 |
| SEQ ID NO: 2543 | 63608078 |
| SEQ ID NO: 2544 | 63608079 |
| SEQ ID NO: 2545 | 63608080 |
| SEQ ID NO: 2546 | 63608081 |
| SEQ ID NO: 2547 | 63608082 |
| SEQ ID NO: 2548 | 63608084 |
| SEQ ID NO: 2549 | 63608085 |
| SEQ ID NO: 2550 | 63608086 |
| SEQ ID NO: 2551 | 63608087 |
| SEQ ID NO: 2552 | 63608088 |
| SEQ ID NO: 2553 | 63608090 |
| SEQ ID NO: 2554 | 63608092 |
| SEQ ID NO: 2555 | 63608093 |
| SEQ ID NO: 2556 | 63608094 |
| SEQ ID NO: 2557 | 63608095 |
| SEQ ID NO: 2558 | 63608096 |
| SEQ ID NO: 2559 | 63608098 |
| SEQ ID NO: 2560 | 63608099 |
| SEQ ID NO: 2561 | 63608100 |
| SEQ ID NO: 2562 | 63608101 |
| SEQ ID NO: 2563 | 63608102 |
| SEQ ID NO: 2564 | 63608103 |
| SEQ ID NO: 2565 | 63608104 |
| SEQ ID NO: 2566 | 63608105 |
| SEQ ID NO: 2567 | 63608106 |
| SEQ ID NO: 2568 | 63608107 |
| SEQ ID NO: 2569 | 63608108 |
| SEQ ID NO: 2570 | 63608109 |
| SEQ ID NO: 2571 | 63608110 |
| SEQ ID NO: 2572 | 63608111 |
| SEQ ID NO: 2573 | 63608112 |
| SEQ ID NO: 2574 | 63608113 |
| SEQ ID NO: 2575 | 63608114 |
| SEQ ID NO: 2576 | 63608115 |
| SEQ ID NO: 2577 | 63608116 |
| SEQ ID NO: 2578 | 63608118 |
| SEQ ID NO: 2579 | 63608119 |
| SEQ ID NO: 2580 | 63608120 |
| SEQ ID NO: 2581 | 63608121 |
| SEQ ID NO: 2582 | 63608122 |
| SEQ ID NO: 2583 | 63608123 |
| SEQ ID NO: 2584 | 63608124 |
| SEQ ID NO: 2585 | 63608125 |
| SEQ ID NO: 2586 | 63608126 |
| SEQ ID NO: 2587 | 63608127 |
| SEQ ID NO: 2588 | 63608128 |
| SEQ ID NO: 2589 | 63608129 |
| SEQ ID NO: 2590 | 63608131 |
| SEQ ID NO: 2591 | 63608132 |
| SEQ ID NO: 2592 | 63608133 |
| SEQ ID NO: 2593 | 63608134 |
| SEQ ID NO: 2594 | 63608135 |
| SEQ ID NO: 2595 | 63608137 |
| SEQ ID NO: 2596 | 63608140 |
| SEQ ID NO: 2597 | 63608141 |
| SEQ ID NO: 2598 | 63608142 |
| SEQ ID NO: 2599 | 63608143 |
| SEQ ID NO: 2600 | 63608144 |
| SEQ ID NO: 2601 | 63608145 |
| SEQ ID NO: 2602 | 63608146 |
| SEQ ID NO: 2603 | 63608147 |
| SEQ ID NO: 2604 | 63608149 |
| SEQ ID NO: 2605 | 63608150 |
| SEQ ID NO: 2606 | 63608151 |
| SEQ ID NO: 2607 | 63608152 |
| SEQ ID NO: 2608 | 63608153 |
| SEQ ID NO: 2609 | 63608155 |
| SEQ ID NO: 2610 | 63608157 |
| SEQ ID NO: 2611 | 63608158 |
| SEQ ID NO: 2612 | 63608159 |
| SEQ ID NO: 2613 | 63608160 |
| SEQ ID NO: 2614 | 63608161 |
| SEQ ID NO: 2615 | 63608162 |
| SEQ ID NO: 2616 | 63608163 |
| SEQ ID NO: 2617 | 63608165 |
| SEQ ID NO: 2618 | 63608166 |
| SEQ ID NO: 2619 | 63608167 |
| SEQ ID NO: 2620 | 63608168 |
| SEQ ID NO: 2621 | 63469738 |
| SEQ ID NO: 2622 | 63469739 |
| SEQ ID NO: 2623 | 63469740 |
| SEQ ID NO: 2624 | 63469741 |
| SEQ ID NO: 2625 | 63469742 |
| SEQ ID NO: 2626 | 63469743 |
| SEQ ID NO: 2627 | 63469744 |
| SEQ ID NO: 2628 | 63469746 |
| SEQ ID NO: 2629 | 63469747 |
| SEQ ID NO: 2630 | 63469749 |
| SEQ ID NO: 2631 | 63469750 |
| SEQ ID NO: 2632 | 63469751 |
| SEQ ID NO: 2633 | 63469752 |
| SEQ ID NO: 2634 | 63469753 |
| SEQ ID NO: 2635 | 63469754 |
| SEQ ID NO: 2636 | 63469755 |
| SEQ ID NO: 2637 | 63469756 |
| SEQ ID NO: 2638 | 63469757 |
| SEQ ID NO: 2639 | 63469758 |
| SEQ ID NO: 2640 | 63469759 |
| SEQ ID NO: 2641 | 63469761 |
| SEQ ID NO: 2642 | 63469762 |
| SEQ ID NO: 2643 | 63469763 |
| SEQ ID NO: 2644 | 63469764 |
| SEQ ID NO: 2645 | 63469765 |
| SEQ ID NO: 2646 | 63469766 |
| SEQ ID NO: 2647 | 63469767 |
| SEQ ID NO: 2648 | 63469769 |
| SEQ ID NO: 2649 | 63469770 |
| SEQ ID NO: 2650 | 63469771 |
| SEQ ID NO: 2651 | 63469772 |
| SEQ ID NO: 2652 | 63469773 |
| SEQ ID NO: 2653 | 63469774 |
| SEQ ID NO: 2654 | 63469775 |
| SEQ ID NO: 2655 | 63469776 |
| SEQ ID NO: 2656 | 63469778 |
| SEQ ID NO: 2657 | 63469779 |
| SEQ ID NO: 2658 | 63469780 |
| SEQ ID NO: 2659 | 63469781 |
| SEQ ID NO: 2660 | 63469782 |
| SEQ ID NO: 2661 | 63469783 |
| SEQ ID NO: 2662 | 63469784 |
| SEQ ID NO: 2663 | 63469785 |
| SEQ ID NO: 2664 | 63469786 |
| SEQ ID NO: 2665 | 63469787 |
| SEQ ID NO: 2666 | 63469788 |
| SEQ ID NO: 2667 | 63469789 |
| SEQ ID NO: 2668 | 63469790 |
| SEQ ID NO: 2669 | 63469791 |
| SEQ ID NO: 2670 | 63469792 |
| SEQ ID NO: 2671 | 63469793 |
| SEQ ID NO: 2672 | 63469794 |
| SEQ ID NO: 2673 | 63469795 |
| SEQ ID NO: 2674 | 63469796 |
| SEQ ID NO: 2675 | 63469797 |
| SEQ ID NO: 2676 | 63469799 |
| SEQ ID NO: 2677 | 63469800 |
| SEQ ID NO: 2678 | 63469801 |
| SEQ ID NO: 2679 | 63469802 |
| SEQ ID NO: 2680 | 63469803 |
| SEQ ID NO: 2681 | 63469804 |
| SEQ ID NO: 2682 | 63469805 |
| SEQ ID NO: 2683 | 63469806 |
| SEQ ID NO: 2684 | 63469807 |
| SEQ ID NO: 2685 | 63469809 |
| SEQ ID NO: 2686 | 63469810 |
| SEQ ID NO: 2687 | 63469811 |
| SEQ ID NO: 2688 | 63469812 |
| SEQ ID NO: 2689 | 63469813 |
| SEQ ID NO: 2690 | 63469814 |
| SEQ ID NO: 2691 | 63469816 |
| SEQ ID NO: 2692 | 63469817 |
| SEQ ID NO: 2693 | 63469818 |
| SEQ ID NO: 2694 | 63469819 |
| SEQ ID NO: 2695 | 63469821 |
| SEQ ID NO: 2696 | 63469822 |
| SEQ ID NO: 2697 | 63469824 |
| SEQ ID NO: 2698 | 63469825 |
| SEQ ID NO: 2699 | 63469826 |
| SEQ ID NO: 2700 | 63469827 |
| SEQ ID NO: 2701 | 63469828 |
| SEQ ID NO: 2702 | 63469829 |
| SEQ ID NO: 2703 | 63469366 |
| SEQ ID NO: 2704 | 63469367 |
| SEQ ID NO: 2705 | 63469369 |
| SEQ ID NO: 2706 | 63469370 |
| SEQ ID NO: 2707 | 63469371 |
| SEQ ID NO: 2708 | 63469372 |
| SEQ ID NO: 2709 | 63469373 |
| SEQ ID NO: 2710 | 63469374 |
| SEQ ID NO: 2711 | 63469375 |
| SEQ ID NO: 2712 | 63469376 |
| SEQ ID NO: 2713 | 63469377 |
| SEQ ID NO: 2714 | 63469379 |
| SEQ ID NO: 2715 | 63469380 |
| SEQ ID NO: 2716 | 63469381 |
| SEQ ID NO: 2717 | 63469382 |
| SEQ ID NO: 2718 | 63469383 |
| SEQ ID NO: 2719 | 63469384 |
| SEQ ID NO: 2720 | 63469386 |
| SEQ ID NO: 2721 | 63469387 |
| SEQ ID NO: 2722 | 63469389 |
| SEQ ID NO: 2723 | 63469390 |
| SEQ ID NO: 2724 | 63469393 |
| SEQ ID NO: 2725 | 63469394 |
| SEQ ID NO: 2726 | 63469396 |
| SEQ ID NO: 2727 | 63469397 |
| SEQ ID NO: 2728 | 63469399 |
| SEQ ID NO: 2729 | 63469400 |
| SEQ ID NO: 2730 | 63469401 |
| SEQ ID NO: 2731 | 63469402 |
| SEQ ID NO: 2732 | 63469403 |
| SEQ ID NO: 2733 | 63469404 |
| SEQ ID NO: 2734 | 63469405 |
| SEQ ID NO: 2735 | 63469406 |
| SEQ ID NO: 2736 | 63469407 |
| SEQ ID NO: 2737 | 63469409 |
| SEQ ID NO: 2738 | 63469410 |
| SEQ ID NO: 2739 | 63469411 |
| SEQ ID NO: 2740 | 63469413 |
| SEQ ID NO: 2741 | 63469414 |
| SEQ ID NO: 2742 | 63469415 |
| SEQ ID NO: 2743 | 63469419 |
| SEQ ID NO: 2744 | 63469420 |
| SEQ ID NO: 2745 | 63469421 |
| SEQ ID NO: 2746 | 63469422 |
| SEQ ID NO: 2747 | 63469424 |
| SEQ ID NO: 2748 | 63469425 |
| SEQ ID NO: 2749 | 63469426 |
| SEQ ID NO: 2750 | 63469428 |
| SEQ ID NO: 2751 | 63469430 |
| SEQ ID NO: 2752 | 63469431 |
| SEQ ID NO: 2753 | 63469432 |
| SEQ ID NO: 2754 | 63469433 |
| SEQ ID NO: 2755 | 63469434 |
| SEQ ID NO: 2756 | 63469435 |
| SEQ ID NO: 2757 | 63469436 |
| SEQ ID NO: 2758 | 63469437 |
| SEQ ID NO: 2759 | 63469438 |
| SEQ ID NO: 2760 | 63469439 |
| SEQ ID NO: 2761 | 63469442 |
| SEQ ID NO: 2762 | 63469443 |
| SEQ ID NO: 2763 | 63469445 |
| SEQ ID NO: 2764 | 63469446 |
| SEQ ID NO: 2765 | 63469449 |
| SEQ ID NO: 2766 | 63469451 |
| SEQ ID NO: 2767 | 63469452 |
| SEQ ID NO: 2768 | 63469453 |
| SEQ ID NO: 2769 | 63469454 |
| SEQ ID NO: 2770 | 63469455 |
| SEQ ID NO: 2771 | 63469456 |
| SEQ ID NO: 2772 | 63469457 |
| SEQ ID NO: 2773 | 63469458 |
| SEQ ID NO: 2774 | 63534125 |
| SEQ ID NO: 2775 | 63534126 |
| SEQ ID NO: 2776 | 63534127 |
| SEQ ID NO: 2777 | 63534128 |
| SEQ ID NO: 2778 | 63534129 |
| SEQ ID NO: 2779 | 63534130 |
| SEQ ID NO: 2780 | 63534131 |
| SEQ ID NO: 2781 | 63534132 |
| SEQ ID NO: 2782 | 63534133 |
| SEQ ID NO: 2783 | 63534134 |
| SEQ ID NO: 2784 | 63534135 |
| SEQ ID NO: 2785 | 63534136 |
| SEQ ID NO: 2786 | 63534137 |
| SEQ ID NO: 2787 | 63534138 |
| SEQ ID NO: 2788 | 63534139 |
| SEQ ID NO: 2789 | 63534140 |
| SEQ ID NO: 2790 | 63534141 |
| SEQ ID NO: 2791 | 63534142 |
| SEQ ID NO: 2792 | 63534143 |
| SEQ ID NO: 2793 | 63534144 |
| SEQ ID NO: 2794 | 63534145 |
| SEQ ID NO: 2795 | 63534146 |
| SEQ ID NO: 2796 | 63534147 |
| SEQ ID NO: 2797 | 63534148 |
| SEQ ID NO: 2798 | 63534149 |
| SEQ ID NO: 2799 | 63534150 |
| SEQ ID NO: 2800 | 63534151 |
| SEQ ID NO: 2801 | 63534152 |
| SEQ ID NO: 2802 | 63534153 |
| SEQ ID NO: 2803 | 63534154 |
| SEQ ID NO: 2804 | 63534155 |
| SEQ ID NO: 2805 | 63534156 |
| SEQ ID NO: 2806 | 63534157 |
| SEQ ID NO: 2807 | 63534158 |
| SEQ ID NO: 2808 | 63534159 |
| SEQ ID NO: 2809 | 63534160 |
| SEQ ID NO: 2810 | 63534161 |
| SEQ ID NO: 2811 | 63534162 |
| SEQ ID NO: 2812 | 63534163 |
| SEQ ID NO: 2813 | 63534164 |
| SEQ ID NO: 2814 | 63534165 |
| SEQ ID NO: 2815 | 63534166 |
| SEQ ID NO: 2816 | 63534167 |
| SEQ ID NO: 2817 | 63534168 |
| SEQ ID NO: 2818 | 63534169 |
| SEQ ID NO: 2819 | 63534170 |
| SEQ ID NO: 2820 | 63534171 |
| SEQ ID NO: 2821 | 63534172 |
| SEQ ID NO: 2822 | 63534173 |
| SEQ ID NO: 2823 | 63534174 |
| SEQ ID NO: 2824 | 63534175 |
| SEQ ID NO: 2825 | 63534176 |
| SEQ ID NO: 2826 | 63534179 |
| SEQ ID NO: 2827 | 63534180 |
| SEQ ID NO: 2828 | 63534181 |
| SEQ ID NO: 2829 | 63534182 |
| SEQ ID NO: 2830 | 63534184 |
| SEQ ID NO: 2831 | 63534185 |
| SEQ ID NO: 2832 | 63534186 |
| SEQ ID NO: 2833 | 63534189 |
| SEQ ID NO: 2834 | 63534190 |
| SEQ ID NO: 2835 | 63534191 |
| SEQ ID NO: 2836 | 63534192 |
| SEQ ID NO: 2837 | 63534193 |
| SEQ ID NO: 2838 | 63534195 |
| SEQ ID NO: 2839 | 63534196 |
| SEQ ID NO: 2840 | 63534197 |
| SEQ ID NO: 2841 | 63534198 |
| SEQ ID NO: 2842 | 63534199 |
| SEQ ID NO: 2843 | 63534200 |
| SEQ ID NO: 2844 | 63534201 |
| SEQ ID NO: 2845 | 63534202 |
| SEQ ID NO: 2846 | 63534203 |
| SEQ ID NO: 2847 | 63534204 |
| SEQ ID NO: 2848 | 63534205 |
| SEQ ID NO: 2849 | 63534206 |
| SEQ ID NO: 2850 | 63534207 |
| SEQ ID NO: 2851 | 63534210 |
| SEQ ID NO: 2852 | 63534212 |
| SEQ ID NO: 2853 | 63534213 |
| SEQ ID NO: 2854 | 63534214 |
| SEQ ID NO: 2855 | 63534215 |
| SEQ ID NO: 2856 | 63534216 |
| SEQ ID NO: 2857 | 63534217 |
| SEQ ID NO: 2858 | 63469459 |
| SEQ ID NO: 2859 | 63469462 |
| SEQ ID NO: 2860 | 63469464 |
| SEQ ID NO: 2861 | 63469465 |
| SEQ ID NO: 2862 | 63469466 |
| SEQ ID NO: 2863 | 63469467 |
| SEQ ID NO: 2864 | 63469468 |
| SEQ ID NO: 2865 | 63469469 |
| SEQ ID NO: 2866 | 63469470 |
| SEQ ID NO: 2867 | 63469471 |
| SEQ ID NO: 2868 | 63469472 |
| SEQ ID NO: 2869 | 63469473 |
| SEQ ID NO: 2870 | 63469475 |
| SEQ ID NO: 2871 | 63469476 |
| SEQ ID NO: 2872 | 63469477 |
| SEQ ID NO: 2873 | 63469479 |
| SEQ ID NO: 2874 | 63469481 |
| SEQ ID NO: 2875 | 63469482 |
| SEQ ID NO: 2876 | 63469483 |
| SEQ ID NO: 2877 | 63469484 |
| SEQ ID NO: 2878 | 63469485 |
| SEQ ID NO: 2879 | 63469486 |
| SEQ ID NO: 2880 | 63469488 |
| SEQ ID NO: 2881 | 63469489 |
| SEQ ID NO: 2882 | 63469490 |
| SEQ ID NO: 2883 | 63469491 |
| SEQ ID NO: 2884 | 63469492 |
| SEQ ID NO: 2885 | 63469493 |
| SEQ ID NO: 2886 | 63469494 |
| SEQ ID NO: 2887 | 63469495 |
| SEQ ID NO: 2888 | 63469496 |
| SEQ ID NO: 2889 | 63469497 |
| SEQ ID NO: 2890 | 63469498 |
| SEQ ID NO: 2891 | 63469499 |
| SEQ ID NO: 2892 | 63469500 |
| SEQ ID NO: 2893 | 63469501 |
| SEQ ID NO: 2894 | 63469502 |
| SEQ ID NO: 2895 | 63469503 |
| SEQ ID NO: 2896 | 63469504 |
| SEQ ID NO: 2897 | 63469505 |
| SEQ ID NO: 2898 | 63469506 |
| SEQ ID NO: 2899 | 63469507 |
| SEQ ID NO: 2900 | 63469509 |
| SEQ ID NO: 2901 | 63469512 |
| SEQ ID NO: 2902 | 63469513 |
| SEQ ID NO: 2903 | 63469514 |
| SEQ ID NO: 2904 | 63469515 |
| SEQ ID NO: 2905 | 63469516 |
| SEQ ID NO: 2906 | 63469517 |
| SEQ ID NO: 2907 | 63469518 |
| SEQ ID NO: 2908 | 63469519 |
| SEQ ID NO: 2909 | 63469520 |
| SEQ ID NO: 2910 | 63469521 |
| SEQ ID NO: 2911 | 63469522 |
| SEQ ID NO: 2912 | 63469523 |
| SEQ ID NO: 2913 | 63469524 |
| SEQ ID NO: 2914 | 63469525 |
| SEQ ID NO: 2915 | 63469526 |
| SEQ ID NO: 2916 | 63469527 |
| SEQ ID NO: 2917 | 63469528 |
| SEQ ID NO: 2918 | 63469529 |
| SEQ ID NO: 2919 | 63469530 |
| SEQ ID NO: 2920 | 63469531 |
| SEQ ID NO: 2921 | 63469532 |
| SEQ ID NO: 2922 | 63469533 |
| SEQ ID NO: 2923 | 63469534 |
| SEQ ID NO: 2924 | 63469535 |
| SEQ ID NO: 2925 | 63469536 |
| SEQ ID NO: 2926 | 63469537 |
| SEQ ID NO: 2927 | 63469538 |
| SEQ ID NO: 2928 | 63469539 |
| SEQ ID NO: 2929 | 63469542 |
| SEQ ID NO: 2930 | 63469543 |
| SEQ ID NO: 2931 | 63469546 |
| SEQ ID NO: 2932 | 63469549 |
| SEQ ID NO: 2933 | 63469550 |
| SEQ ID NO: 2934 | 63469551 |
| SEQ ID NO: 2935 | 63534683 |
| SEQ ID NO: 2936 | 63534684 |
| SEQ ID NO: 2937 | 63534685 |
| SEQ ID NO: 2938 | 63534686 |
| SEQ ID NO: 2939 | 63534687 |
| SEQ ID NO: 2940 | 63534688 |
| SEQ ID NO: 2941 | 63534689 |
| SEQ ID NO: 2942 | 63534691 |
| SEQ ID NO: 2943 | 63534692 |
| SEQ ID NO: 2944 | 63534693 |
| SEQ ID NO: 2945 | 63534694 |
| SEQ ID NO: 2946 | 63534695 |
| SEQ ID NO: 2947 | 63534696 |
| SEQ ID NO: 2948 | 63534697 |
| SEQ ID NO: 2949 | 63534698 |
| SEQ ID NO: 2950 | 63534700 |
| SEQ ID NO: 2951 | 63534701 |
| SEQ ID NO: 2952 | 63534702 |
| SEQ ID NO: 2953 | 63534703 |
| SEQ ID NO: 2954 | 63534704 |
| SEQ ID NO: 2955 | 63534705 |
| SEQ ID NO: 2956 | 63534706 |
| SEQ ID NO: 2957 | 63534707 |
| SEQ ID NO: 2958 | 63534708 |
| SEQ ID NO: 2959 | 63534709 |
| SEQ ID NO: 2960 | 63534710 |
| SEQ ID NO: 2961 | 63534711 |
| SEQ ID NO: 2962 | 63534712 |
| SEQ ID NO: 2963 | 63534713 |
| SEQ ID NO: 2964 | 63534714 |
| SEQ ID NO: 2965 | 63534715 |
| SEQ ID NO: 2966 | 63534716 |
| SEQ ID NO: 2967 | 63534717 |
| SEQ ID NO: 2968 | 63534718 |
| SEQ ID NO: 2969 | 63534719 |
| SEQ ID NO: 2970 | 63534720 |
| SEQ ID NO: 2971 | 63534722 |
| SEQ ID NO: 2972 | 63534723 |
| SEQ ID NO: 2973 | 63534724 |
| SEQ ID NO: 2974 | 63534725 |
| SEQ ID NO: 2975 | 63534726 |
| SEQ ID NO: 2976 | 63534727 |
| SEQ ID NO: 2977 | 63534728 |
| SEQ ID NO: 2978 | 63534729 |
| SEQ ID NO: 2979 | 63534730 |
| SEQ ID NO: 2980 | 63534733 |
| SEQ ID NO: 2981 | 63534735 |
| SEQ ID NO: 2982 | 63534736 |
| SEQ ID NO: 2983 | 63534737 |
| SEQ ID NO: 2984 | 63534738 |
| SEQ ID NO: 2985 | 63534739 |
| SEQ ID NO: 2986 | 63534740 |
| SEQ ID NO: 2987 | 63534741 |
| SEQ ID NO: 2988 | 63534742 |
| SEQ ID NO: 2989 | 63534744 |
| SEQ ID NO: 2990 | 63534745 |
| SEQ ID NO: 2991 | 63534746 |
| SEQ ID NO: 2992 | 63534747 |
| SEQ ID NO: 2993 | 63534748 |
| SEQ ID NO: 2994 | 63534749 |
| SEQ ID NO: 2995 | 63534750 |
| SEQ ID NO: 2996 | 63534751 |
| SEQ ID NO: 2997 | 63534752 |
| SEQ ID NO: 2998 | 63534753 |
| SEQ ID NO: 2999 | 63534754 |
| SEQ ID NO: 3000 | 63534755 |
| SEQ ID NO: 3001 | 63534757 |
| SEQ ID NO: 3002 | 63534758 |
| SEQ ID NO: 3003 | 63534759 |
| SEQ ID NO: 3004 | 63534760 |
| SEQ ID NO: 3005 | 63534761 |
| SEQ ID NO: 3006 | 63534762 |
| SEQ ID NO: 3007 | 63534763 |
| SEQ ID NO: 3008 | 63534764 |
| SEQ ID NO: 3009 | 63534766 |
| SEQ ID NO: 3010 | 63534768 |
| SEQ ID NO: 3011 | 63534770 |
| SEQ ID NO: 3012 | 63534772 |
| SEQ ID NO: 3013 | 63534773 |
| SEQ ID NO: 3014 | 63534774 |
| SEQ ID NO: 3015 | 63534775 |
| SEQ ID NO: 3016 | 63689856 |
| SEQ ID NO: 3017 | 63689857 |
| SEQ ID NO: 3018 | 63689858 |
| SEQ ID NO: 3019 | 63689859 |
| SEQ ID NO: 3020 | 63689861 |
| SEQ ID NO: 3021 | 63689862 |
| SEQ ID NO: 3022 | 63689863 |
| SEQ ID NO: 3023 | 63689864 |
| SEQ ID NO: 3024 | 63689865 |
| SEQ ID NO: 3025 | 63689866 |
| SEQ ID NO: 3026 | 63689867 |
| SEQ ID NO: 3027 | 63689868 |
| SEQ ID NO: 3028 | 63689869 |
| SEQ ID NO: 3029 | 63689870 |
| SEQ ID NO: 3030 | 63689871 |
| SEQ ID NO: 3031 | 63689872 |
| SEQ ID NO: 3032 | 63689873 |
| SEQ ID NO: 3033 | 63689875 |
| SEQ ID NO: 3034 | 63689877 |
| SEQ ID NO: 3035 | 63689879 |
| SEQ ID NO: 3036 | 63689880 |
| SEQ ID NO: 3037 | 63689882 |
| SEQ ID NO: 3038 | 63689883 |
| SEQ ID NO: 3039 | 63689884 |
| SEQ ID NO: 3040 | 63689885 |
| SEQ ID NO: 3041 | 63689886 |
| SEQ ID NO: 3042 | 63689887 |
| SEQ ID NO: 3043 | 63689888 |
| SEQ ID NO: 3044 | 63689889 |
| SEQ ID NO: 3045 | 63689890 |
| SEQ ID NO: 3046 | 63689891 |
| SEQ ID NO: 3047 | 63689892 |
| SEQ ID NO: 3048 | 63689893 |
| SEQ ID NO: 3049 | 63689894 |
| SEQ ID NO: 3050 | 63689895 |
| SEQ ID NO: 3051 | 63689897 |
| SEQ ID NO: 3052 | 63689898 |
| SEQ ID NO: 3053 | 63689899 |
| SEQ ID NO: 3054 | 63689901 |
| SEQ ID NO: 3055 | 63689902 |
| SEQ ID NO: 3056 | 63689903 |
| SEQ ID NO: 3057 | 63689904 |
| SEQ ID NO: 3058 | 63689905 |
| SEQ ID NO: 3059 | 63689906 |
| SEQ ID NO: 3060 | 63689907 |
| SEQ ID NO: 3061 | 63689910 |
| SEQ ID NO: 3062 | 63689911 |
| SEQ ID NO: 3063 | 63689912 |
| SEQ ID NO: 3064 | 63689913 |
| SEQ ID NO: 3065 | 63689914 |
| SEQ ID NO: 3066 | 63689916 |
| SEQ ID NO: 3067 | 63689917 |
| SEQ ID NO: 3068 | 63689918 |
| SEQ ID NO: 3069 | 63689919 |
| SEQ ID NO: 3070 | 63689920 |
| SEQ ID NO: 3071 | 63689921 |
| SEQ ID NO: 3072 | 63689922 |
| SEQ ID NO: 3073 | 63689923 |
| SEQ ID NO: 3074 | 63689924 |
| SEQ ID NO: 3075 | 63689925 |
| SEQ ID NO: 3076 | 63689926 |
| SEQ ID NO: 3077 | 63689928 |
| SEQ ID NO: 3078 | 63689929 |
| SEQ ID NO: 3079 | 63689930 |
| SEQ ID NO: 3080 | 63689931 |
| SEQ ID NO: 3081 | 63689933 |
| SEQ ID NO: 3082 | 63689934 |
| SEQ ID NO: 3083 | 63689935 |
| SEQ ID NO: 3084 | 63689936 |
| SEQ ID NO: 3085 | 63689937 |
| SEQ ID NO: 3086 | 63689938 |
| SEQ ID NO: 3087 | 63689939 |
| SEQ ID NO: 3088 | 63689940 |
| SEQ ID NO: 3089 | 63689941 |
| SEQ ID NO: 3090 | 63689942 |
| SEQ ID NO: 3091 | 63689944 |
| SEQ ID NO: 3092 | 63689945 |
| SEQ ID NO: 3093 | 63689946 |
| SEQ ID NO: 3094 | 63689947 |
| SEQ ID NO: 3095 | 63689669 |
| SEQ ID NO: 3096 | 63689670 |
| SEQ ID NO: 3097 | 63689671 |
| SEQ ID NO: 3098 | 63689672 |
| SEQ ID NO: 3099 | 63689673 |
| SEQ ID NO: 3100 | 63689674 |
| SEQ ID NO: 3101 | 63689675 |
| SEQ ID NO: 3102 | 63689676 |
| SEQ ID NO: 3103 | 63689677 |
| SEQ ID NO: 3104 | 63689678 |
| SEQ ID NO: 3105 | 63689679 |
| SEQ ID NO: 3106 | 63689680 |
| SEQ ID NO: 3107 | 63689681 |
| SEQ ID NO: 3108 | 63689682 |
| SEQ ID NO: 3109 | 63689683 |
| SEQ ID NO: 3110 | 63689684 |
| SEQ ID NO: 3111 | 63689685 |
| SEQ ID NO: 3112 | 63689686 |
| SEQ ID NO: 3113 | 63689687 |
| SEQ ID NO: 3114 | 63689688 |
| SEQ ID NO: 3115 | 63689690 |
| SEQ ID NO: 3116 | 63689691 |
| SEQ ID NO: 3117 | 63689692 |
| SEQ ID NO: 3118 | 63689693 |
| SEQ ID NO: 3119 | 63689694 |
| SEQ ID NO: 3120 | 63689695 |
| SEQ ID NO: 3121 | 63689696 |
| SEQ ID NO: 3122 | 63689697 |
| SEQ ID NO: 3123 | 63689698 |
| SEQ ID NO: 3124 | 63689699 |
| SEQ ID NO: 3125 | 63689700 |
| SEQ ID NO: 3126 | 63689701 |
| SEQ ID NO: 3127 | 63689702 |
| SEQ ID NO: 3128 | 63689703 |
| SEQ ID NO: 3129 | 63689704 |
| SEQ ID NO: 3130 | 63689705 |
| SEQ ID NO: 3131 | 63689706 |
| SEQ ID NO: 3132 | 63689707 |
| SEQ ID NO: 3133 | 63689709 |
| SEQ ID NO: 3134 | 63689710 |
| SEQ ID NO: 3135 | 63689711 |
| SEQ ID NO: 3136 | 63689712 |
| SEQ ID NO: 3137 | 63689713 |
| SEQ ID NO: 3138 | 63689714 |
| SEQ ID NO: 3139 | 63689715 |
| SEQ ID NO: 3140 | 63689716 |
| SEQ ID NO: 3141 | 63689717 |
| SEQ ID NO: 3142 | 63689718 |
| SEQ ID NO: 3143 | 63689719 |
| SEQ ID NO: 3144 | 63689721 |
| SEQ ID NO: 3145 | 63689722 |
| SEQ ID NO: 3146 | 63689723 |
| SEQ ID NO: 3147 | 63689724 |
| SEQ ID NO: 3148 | 63689725 |
| SEQ ID NO: 3149 | 63689726 |
| SEQ ID NO: 3150 | 63689727 |
| SEQ ID NO: 3151 | 63689728 |
| SEQ ID NO: 3152 | 63689729 |
| SEQ ID NO: 3153 | 63689730 |
| SEQ ID NO: 3154 | 63689731 |
| SEQ ID NO: 3155 | 63689732 |
| SEQ ID NO: 3156 | 63689733 |
| SEQ ID NO: 3157 | 63689734 |
| SEQ ID NO: 3158 | 63689735 |
| SEQ ID NO: 3159 | 63689736 |
| SEQ ID NO: 3160 | 63689737 |
| SEQ ID NO: 3161 | 63689738 |
| SEQ ID NO: 3162 | 63689739 |
| SEQ ID NO: 3163 | 63689740 |
| SEQ ID NO: 3164 | 63689741 |
| SEQ ID NO: 3165 | 63689743 |
| SEQ ID NO: 3166 | 63689744 |
| SEQ ID NO: 3167 | 63689745 |
| SEQ ID NO: 3168 | 63689746 |
| SEQ ID NO: 3169 | 63689748 |
| SEQ ID NO: 3170 | 63689749 |
| SEQ ID NO: 3171 | 63689750 |
| SEQ ID NO: 3172 | 63689751 |
| SEQ ID NO: 3173 | 63689753 |
| SEQ ID NO: 3174 | 63689754 |
| SEQ ID NO: 3175 | 63689755 |
| SEQ ID NO: 3176 | 63689756 |
| SEQ ID NO: 3177 | 63689757 |
| SEQ ID NO: 3178 | 63689758 |
| SEQ ID NO: 3179 | 63689759 |
| SEQ ID NO: 3180 | 63689760 |
| SEQ ID NO: 3181 | 63689761 |
| SEQ ID NO: 3182 | 63717438 |
| SEQ ID NO: 3183 | 63717439 |
| SEQ ID NO: 3184 | 63717440 |
| SEQ ID NO: 3185 | 63717441 |
| SEQ ID NO: 3186 | 63717442 |
| SEQ ID NO: 3187 | 63717443 |
| SEQ ID NO: 3188 | 63717444 |
| SEQ ID NO: 3189 | 63717445 |
| SEQ ID NO: 3190 | 63717446 |
| SEQ ID NO: 3191 | 63717447 |
| SEQ ID NO: 3192 | 63717448 |
| SEQ ID NO: 3193 | 63717449 |
| SEQ ID NO: 3194 | 63717450 |
| SEQ ID NO: 3195 | 63717451 |
| SEQ ID NO: 3196 | 63717452 |
| SEQ ID NO: 3197 | 63717453 |
| SEQ ID NO: 3198 | 63717454 |
| SEQ ID NO: 3199 | 63717455 |
| SEQ ID NO: 3200 | 63717456 |
| SEQ ID NO: 3201 | 63717457 |
| SEQ ID NO: 3202 | 63717459 |
| SEQ ID NO: 3203 | 63717460 |
| SEQ ID NO: 3204 | 63717461 |
| SEQ ID NO: 3205 | 63717462 |
| SEQ ID NO: 3206 | 63717463 |
| SEQ ID NO: 3207 | 63717464 |
| SEQ ID NO: 3208 | 63717465 |
| SEQ ID NO: 3209 | 63717466 |
| SEQ ID NO: 3210 | 63717467 |
| SEQ ID NO: 3211 | 63717468 |
| SEQ ID NO: 3212 | 63717469 |
| SEQ ID NO: 3213 | 63717470 |
| SEQ ID NO: 3214 | 63717472 |
| SEQ ID NO: 3215 | 63717473 |
| SEQ ID NO: 3216 | 63717474 |
| SEQ ID NO: 3217 | 63717475 |
| SEQ ID NO: 3218 | 63717476 |
| SEQ ID NO: 3219 | 63717477 |
| SEQ ID NO: 3220 | 63717478 |
| SEQ ID NO: 3221 | 63717479 |
| SEQ ID NO: 3222 | 63717480 |
| SEQ ID NO: 3223 | 63717481 |
| SEQ ID NO: 3224 | 63717482 |
| SEQ ID NO: 3225 | 63717524 |
| SEQ ID NO: 3226 | 64185191 |
| SEQ ID NO: 3227 | 64185192 |
| SEQ ID NO: 3228 | 64185195 |
| SEQ ID NO: 3229 | 64185196 |
| SEQ ID NO: 3230 | 64185197 |
| SEQ ID NO: 3231 | 64185198 |
| SEQ ID NO: 3232 | 64185199 |
| SEQ ID NO: 3233 | 64185202 |
| SEQ ID NO: 3234 | 64185205 |
| SEQ ID NO: 3235 | 64185206 |
| SEQ ID NO: 3236 | 64185210 |
| SEQ ID NO: 3237 | 64185211 |
| SEQ ID NO: 3238 | 64185213 |
| SEQ ID NO: 3239 | 64185214 |
| SEQ ID NO: 3240 | 64185217 |
| SEQ ID NO: 3241 | 64185219 |
| SEQ ID NO: 3242 | 64185220 |
| SEQ ID NO: 3243 | 64185221 |
| SEQ ID NO: 3244 | 64185222 |
| SEQ ID NO: 3245 | 64185225 |
| SEQ ID NO: 3246 | 64185226 |
| SEQ ID NO: 3247 | 64185227 |
| SEQ ID NO: 3248 | 64185231 |
| SEQ ID NO: 3249 | 64185233 |
| SEQ ID NO: 3250 | 64185234 |
| SEQ ID NO: 3251 | 64185238 |
| SEQ ID NO: 3252 | 64185240 |
| SEQ ID NO: 3253 | 64185243 |
| SEQ ID NO: 3254 | 64185246 |
| SEQ ID NO: 3255 | 64185248 |
| SEQ ID NO: 3256 | 64185249 |
| SEQ ID NO: 3257 | 64185250 |
| SEQ ID NO: 3258 | 64185251 |
| SEQ ID NO: 3259 | 64185252 |
| SEQ ID NO: 3260 | 64185253 |
| SEQ ID NO: 3261 | 64185255 |
| SEQ ID NO: 3262 | 64185257 |
| SEQ ID NO: 3263 | 64185260 |
| SEQ ID NO: 3264 | 64185262 |
| SEQ ID NO: 3265 | 64185264 |
| SEQ ID NO: 3266 | 64185265 |
| SEQ ID NO: 3267 | 64185266 |
| SEQ ID NO: 3268 | 64185271 |
| SEQ ID NO: 3269 | 64185275 |
| SEQ ID NO: 3270 | 64185277 |
| SEQ ID NO: 3271 | 64185281 |
| SEQ ID NO: 3272 | 64185282 |
| SEQ ID NO: 3273 | 63791915 |
| SEQ ID NO: 3274 | 63791917 |
| SEQ ID NO: 3275 | 63791918 |
| SEQ ID NO: 3276 | 63791919 |
| SEQ ID NO: 3277 | 63791920 |
| SEQ ID NO: 3278 | 63791921 |
| SEQ ID NO: 3279 | 63791922 |
| SEQ ID NO: 3280 | 63791924 |
| SEQ ID NO: 3281 | 63791928 |
| SEQ ID NO: 3282 | 63791929 |
| SEQ ID NO: 3283 | 63791931 |
| SEQ ID NO: 3284 | 63791932 |
| SEQ ID NO: 3285 | 63791933 |
| SEQ ID NO: 3286 | 63791934 |
| SEQ ID NO: 3287 | 63791935 |
| SEQ ID NO: 3288 | 63791939 |
| SEQ ID NO: 3289 | 63791940 |
| SEQ ID NO: 3290 | 63791941 |
| SEQ ID NO: 3291 | 63791942 |
| SEQ ID NO: 3292 | 63791943 |
| SEQ ID NO: 3293 | 63791944 |
| SEQ ID NO: 3294 | 63791945 |
| SEQ ID NO: 3295 | 63791947 |
| SEQ ID NO: 3296 | 63791948 |
| SEQ ID NO: 3297 | 63791951 |
| SEQ ID NO: 3298 | 63791952 |
| SEQ ID NO: 3299 | 63791953 |
| SEQ ID NO: 3300 | 63791954 |
| SEQ ID NO: 3301 | 63791955 |
| SEQ ID NO: 3302 | 63791956 |
| SEQ ID NO: 3303 | 63791957 |
| SEQ ID NO: 3304 | 63791958 |
| SEQ ID NO: 3305 | 63791960 |
| SEQ ID NO: 3306 | 63791962 |
| SEQ ID NO: 3307 | 63791963 |
| SEQ ID NO: 3308 | 63791964 |
| SEQ ID NO: 3309 | 63791965 |
| SEQ ID NO: 3310 | 63791966 |
| SEQ ID NO: 3311 | 63791967 |
| SEQ ID NO: 3312 | 63791969 |
| SEQ ID NO: 3313 | 63791970 |
| SEQ ID NO: 3314 | 63791971 |
| SEQ ID NO: 3315 | 63791972 |
| SEQ ID NO: 3316 | 63791973 |
| SEQ ID NO: 3317 | 63791974 |
| SEQ ID NO: 3318 | 63791975 |
| SEQ ID NO: 3319 | 63791977 |
| SEQ ID NO: 3320 | 63791978 |
| SEQ ID NO: 3321 | 63791979 |
| SEQ ID NO: 3322 | 63791980 |
| SEQ ID NO: 3323 | 63791981 |
| SEQ ID NO: 3324 | 63791982 |
| SEQ ID NO: 3325 | 63791983 |
| SEQ ID NO: 3326 | 63791986 |
| SEQ ID NO: 3327 | 63791987 |
| SEQ ID NO: 3328 | 63791988 |
| SEQ ID NO: 3329 | 63791989 |
| SEQ ID NO: 3330 | 63791990 |
| SEQ ID NO: 3331 | 63791991 |
| SEQ ID NO: 3332 | 63791993 |
| SEQ ID NO: 3333 | 63791994 |
| SEQ ID NO: 3334 | 63791995 |
| SEQ ID NO: 3335 | 63791999 |
| SEQ ID NO: 3336 | 63792001 |
| SEQ ID NO: 3337 | 63792002 |
| SEQ ID NO: 3338 | 63792003 |
| SEQ ID NO: 3339 | 63792005 |
| SEQ ID NO: 3340 | 63792006 |
| SEQ ID NO: 3341 | 63792008 |
| SEQ ID NO: 3342 | 63792009 |
| SEQ ID NO: 3343 | 63792010 |
| SEQ ID NO: 3344 | 63792011 |
| SEQ ID NO: 3345 | 63792012 |
| SEQ ID NO: 3346 | 63792013 |
| SEQ ID NO: 3347 | 63792014 |
| SEQ ID NO: 3348 | 63792016 |
| SEQ ID NO: 3349 | 63792017 |
| SEQ ID NO: 3350 | 63792019 |
| SEQ ID NO: 3351 | 63792020 |
| SEQ ID NO: 3352 | 63792021 |
| SEQ ID NO: 3353 | 63792022 |
| SEQ ID NO: 3354 | 63792023 |
| SEQ ID NO: 3355 | 63792024 |
| SEQ ID NO: 3356 | 63792025 |
| SEQ ID NO: 3357 | 63792026 |
| SEQ ID NO: 3358 | 63792027 |
| SEQ ID NO: 3359 | 63792028 |
| SEQ ID NO: 3360 | 63792032 |
| SEQ ID NO: 3361 | 63792033 |
| SEQ ID NO: 3362 | 63792034 |
| SEQ ID NO: 3363 | 63792035 |
| SEQ ID NO: 3364 | 63792036 |
| SEQ ID NO: 3365 | 63792037 |
| SEQ ID NO: 3366 | 63792038 |
| SEQ ID NO: 3367 | 63792039 |
| SEQ ID NO: 3368 | 63792040 |
| SEQ ID NO: 3369 | 63792041 |
| SEQ ID NO: 3370 | 63792043 |
| SEQ ID NO: 3371 | 63792044 |
| SEQ ID NO: 3372 | 63792045 |
| SEQ ID NO: 3373 | 63792046 |
| SEQ ID NO: 3374 | 63792047 |
| SEQ ID NO: 3375 | 63792048 |
| SEQ ID NO: 3376 | 63792050 |
| SEQ ID NO: 3377 | 63792052 |
| SEQ ID NO: 3378 | 63792053 |
| SEQ ID NO: 3379 | 63792055 |
| SEQ ID NO: 3380 | 63792056 |
| SEQ ID NO: 3381 | 63792057 |
| SEQ ID NO: 3382 | 63792058 |
| SEQ ID NO: 3383 | 63792059 |
| SEQ ID NO: 3384 | 63792060 |
| SEQ ID NO: 3385 | 63792061 |
| SEQ ID NO: 3386 | 63792063 |
| SEQ ID NO: 3387 | 63792064 |
| SEQ ID NO: 3388 | 63792065 |
| SEQ ID NO: 3389 | 63792066 |
| SEQ ID NO: 3390 | 63792067 |
| SEQ ID NO: 3391 | 63792068 |
| SEQ ID NO: 3392 | 63792069 |
| SEQ ID NO: 3393 | 63792070 |
| SEQ ID NO: 3394 | 63792071 |
| SEQ ID NO: 3395 | 63792072 |
| SEQ ID NO: 3396 | 63792074 |
| SEQ ID NO: 3397 | 63792075 |
| SEQ ID NO: 3398 | 63792076 |
| SEQ ID NO: 3399 | 63792077 |
| SEQ ID NO: 3400 | 63792078 |
| SEQ ID NO: 3401 | 63792079 |
| SEQ ID NO: 3402 | 63792082 |
| SEQ ID NO: 3403 | 63792083 |
| SEQ ID NO: 3404 | 63792084 |
| SEQ ID NO: 3405 | 63792085 |
| SEQ ID NO: 3406 | 63792086 |
| SEQ ID NO: 3407 | 63792087 |
| SEQ ID NO: 3408 | 63792088 |
| SEQ ID NO: 3409 | 63792090 |
| SEQ ID NO: 3410 | 63792091 |
| SEQ ID NO: 3411 | 63792092 |
| SEQ ID NO: 3412 | 63792093 |
| SEQ ID NO: 3413 | 63792094 |
| SEQ ID NO: 3414 | 63792095 |
| SEQ ID NO: 3415 | 63792097 |
| SEQ ID NO: 3416 | 63792098 |
| SEQ ID NO: 3417 | 63792099 |

### DETAILED DESCRIPTION OF THE INVENTION

[1172] The present invention is directed generally to compositions and their use in the therapy and diagnosis of cancer, particularly colon cancer. As described further below, illustrative compositions of the present invention include, but are not restricted to, polypeptides, particularly immunogenic polypeptides, polynucleotides encoding such polypeptides, antibodies and other binding agents, antigen presenting cells (APCs) and immune system cells (e.g., T cells).

[1173] The practice of the present invention will employ, unless indicated specifically to the contrary, conventional methods of virology, immunology, microbiology, molecular biology and recombinant DNA techniques within the skill of the art, many of which are described below for the purpose of illustration. Such techniques are explained fully in the literature. See, e.g., Sambrook, et al. Molecular Cloning: A Laboratory Manual (2nd Edition, 1989); Maniatis et al. Molecular Cloning: A Laboratory Manual (1982); DNA Cloning: A Practical Approach, vol. I & II (D. Glover, ed.); Oligonucleotide Synthesis (N. Gait, ed., 1984); Nucleic Acid Hybridization (B. Hames & S. Higgins, eds., 1985); Transcription and Translation (B. Hames & S. Higgins, eds., 1984); Animal Cell Culture (R. Freshney, ed., 1986); Perbal, A Practical Guide to Molecular Cloning (1984).

[1174] All publications, patents and patent applications cited herein, whether supra or infra, are hereby incorporated by reference in their entirety.

[1175] As used in this specification and the appended claims, the singular forms “a,” “an” and “the” include plural references unless the content clearly dictates otherwise.

[1176] Polypeptide Compositions

[1177] As used herein, the term “polypeptide” is used in its conventional meaning, i.e., as a sequence of amino acids. The polypeptides are not limited to a specific length of the product; thus, peptides, oligopeptides, and proteins are included within the definition of polypeptide, and such terms may be used interchangeably herein unless specifically indicated otherwise. This term also does not refer to or exclude post-expression modifications of the polypeptide, for example, glycosylations, acetylations, phosphorylations and the like, as well as other modifications known in the art, both naturally occurring and non-naturally occurring. A polypeptide may be an entire protein, or a subsequence thereof. Particular polypeptides of interest in the context of this invention are amino acid subsequences comprising epitopes, i.e., antigenic determinants substantially responsible for the immunogenic properties of a polypeptide and being capable of evoking an immune response.

[1178] Particularly illustrative polypeptides of the present invention comprise those encoded by a polynucleotide sequence set forth in any one of SEQ ID NOs: 1-1421, 1425, 1427, and 1430-3417, or a sequence that hybridizes under moderately stringent conditions, or, alternatively, under highly stringent conditions, to a polynucleotide sequence set forth in any one of SEQ ID NOs: 1-1421, 1425, 1427, and 1430-3417. Certain other illustrative polypeptides of the invention comprise amino acid sequences as set forth in any one of SEQ ID NOs: 1422-1424, 1426, 1428, and 1429.

[1179] The polypeptides of the present invention are sometimes herein referred to as colon tumor proteins or colon tumor polypeptides, as an indication that their identification has been based at least in part upon their increased levels of expression in colon tumor samples. Thus, a “colon tumor polypeptide” or “colon tumor protein,” refers generally to a polypeptide sequence of the present invention, or a polynucleotide sequence encoding such a polypeptide, that is expressed in a substantial proportion of colon tumor samples, for example preferably greater than about 20%, more preferably greater than about 30%, and most preferably greater than about 50% or more of colon tumor samples tested, at a level that is at least two fold, and preferably at least five fold, greater than the level of expression in normal tissues, as determined using a representative assay provided herein. A colon tumor polypeptide sequence of the invention, based upon its increased level of expression in tumor cells, has particular utility both as a diagnostic marker as well as a therapeutic target, as further described below.

[1180] In certain preferred embodiments, the polypeptides of the invention are immunogenic, i.e., they react detectably within an immunoassay (such as an ELISA or T-cell stimulation assay) with antisera and/or T-cells from a patient with colon cancer. Screening for immunogenic activity can be performed using techniques well known to the skilled artisan. For example, such screens can be performed using methods such as those described in Harlow and Lane, Antibodies: A Laboratory Manual, Cold Spring Harbor Laboratory, 1988. In one illustrative example, a polypeptide may be immobilized on a solid support and contacted with patient sera to allow binding of antibodies within the sera to the immobilized polypeptide. Unbound sera may then be removed and bound antibodies detected using, for example, ¹²⁵I-labeled Protein A.

[1181] As would be recognized by the skilled artisan, immunogenic portions of the polypeptides disclosed herein are also encompassed by the present invention. An “immunogenic portion,” as used herein, is a fragment of an immunogenic polypeptide of the invention that itself is immunologically reactive (i.e., specifically binds) with the B-cells and/or T-cell surface antigen receptors that recognize the polypeptide. Immunogenic portions may generally be identified using well known techniques, such as those summarized in Paul, Fundamental Immunology, 3rd ed., 243-247 (Raven Press, 1993) and references cited therein. Such techniques include screening polypeptides for the ability to react with antigen-specific antibodies, antisera and/or T-cell lines or clones. As used herein, antisera and antibodies are “antigen-specific” if they specifically bind to an antigen (i.e., they react with the protein in an ELISA or other immunoassay, and do not react detectably with unrelated proteins). Such antisera and antibodies may be prepared as described herein, and using well-known techniques.

[1182] In one preferred embodiment, an immunogenic portion of a polypeptide of the present invention is a portion that reacts with antisera and/or T-cells at a level that is not substantially less than the reactivity of the full-length polypeptide (e.g., in an ELISA and/or T-cell reactivity assay). Preferably, the level of immunogenic activity of the immunogenic portion is at least about 50%, preferably at least about 70% and most preferably greater than about 90% of the immunogenicity for the full-length polypeptide. In some instances, preferred immunogenic portions will be identified that have a level of immunogenic activity greater than that of the corresponding full-length polypeptide, e.g., having greater than about 100% or 150% or more immunogenic activity.

[1183] In certain other embodiments, illustrative immunogenic portions may include peptides in which an N-terminal leader sequence and/or transmembrane domain have been deleted. Other illustrative immunogenic portions will contain a small N- and/or C-terminal deletion (e.g., 1-30 amino acids, preferably 5-15 amino acids), relative to the mature protein.

[1184] In another embodiment, a polypeptide composition of the invention may also comprise one or more polypeptides that are immunologically reactive with T cells and/or antibodies generated against a polypeptide of the invention, particularly a polypeptide having an amino acid sequence disclosed herein, or to an immunogenic fragment or variant thereof.

[1185] In another embodiment of the invention, polypeptides are provided that comprise one or more polypeptides that are capable of eliciting T cells and/or antibodies that are immunologically reactive with one or more polypeptides described herein, or one or more polypeptides encoded by contiguous nucleic acid sequences contained in the polynucleotide sequences disclosed herein, or immunogenic fragments or variants thereof, or to one or more nucleic acid sequences which hybridize to one or more of these sequences under conditions of moderate to high stringency.

[1186] The present invention, in another aspect, provides polypeptide fragments comprising at least about 5, 10, 15, 20, 25, 50, or 100 contiguous amino acids, or more, including all intermediate lengths, of a polypeptide compositions set forth herein, such as those set forth in SEQ ID NOs: 1422-1424, 1426, 1428, and 1429, or those encoded by a polynucleotide sequence set forth in a sequence of SEQ ID NOs: 1-1421, 1425, 1427, and 1430-3417.

[1187] In another aspect, the present invention provides variants of the polypeptide compositions described herein. Polypeptide variants generally encompassed by the present invention will typically exhibit at least about 70%, 75%, 80%, 85%, 90%, 91%, 92%, 93%, 94%, 95%, 96%, 97%, 98%, or 99% or more identity (determined as described below), along its length, to a polypeptide sequences set forth herein.

[1188] In one preferred embodiment, the polypeptide fragments and variants provided by the present invention are immunologically reactive with an antibody and/or T-cell that reacts with a full-length polypeptide specifically set forth herein.

[1189] In another preferred embodiment, the polypeptide fragments and variants provided by the present invention exhibit a level of immunogenic activity of at least about 50%, preferably at least about 70%, and most preferably at least about 90% or more of that exhibited by a full-length polypeptide sequence specifically set forth herein.

[1190] A polypeptide “variant,” as the term is used herein, is a polypeptide that typically differs from a polypeptide specifically disclosed herein in one or more substitutions, deletions, additions and/or insertions. Such variants may be naturally occurring or may be synthetically generated, for example, by modifying one or more of the above polypeptide sequences of the invention and evaluating their immunogenic activity as described herein and/or using any of a number of techniques well known in the art.

[1191] For example, certain illustrative variants of the polypeptides of the invention include those in which one or more portions, such as an N-terminal leader sequence or transmembrane domain, have been removed. Other illustrative variants include variants in which a small portion (e.g., 1-30 amino acids, preferably 5-15 amino acids) has been removed from the N- and/or C-terminal of the mature protein.

[1192] In many instances, a variant will contain conservative substitutions. A “conservative substitution” is one in which an amino acid is substituted for another amino acid that has similar properties, such that one skilled in the art of peptide chemistry would expect the secondary structure and hydropathic nature of the polypeptide to be substantially unchanged. As described above, modifications may be made in the structure of the polynucleotides and polypeptides of the present invention and still obtain a functional molecule that encodes a variant or derivative polypeptide with desirable characteristics, e.g., with immunogenic characteristics. When it is desired to alter the amino acid sequence of a polypeptide to create an equivalent, or even an improved, immunogenic variant or portion of a polypeptide of the invention, one skilled in the art will typically change one or more of the codons of the encoding DNA sequence according to Table 1.

[1193] For example, certain amino acids may be substituted for other amino acids in a protein structure without appreciable loss of interactive binding capacity with structures such as, for example, antigen-binding regions of antibodies or binding sites on substrate molecules. Since it is the interactive capacity and nature of a protein that defines that protein's biological functional activity, certain amino acid sequence substitutions can be made in a protein sequence, and, of course, its underlying DNA coding sequence, and nevertheless obtain a protein with like properties. It is thus contemplated that various changes may be made in the peptide sequences of the disclosed compositions, or corresponding DNA sequences which encode said peptides without appreciable loss of their biological utility or activity.

TABLE 1

| Amino Acids | | | Codons | | | | | |
|---|---|---|---|---|---|---|---|---|
| Alanine | Ala | A | GCA | GCC | GCG | GCU | | |
| Cysteine | Cys | C | UGC | UGU | | | | |
| Aspartic acid | Asp | D | GAC | GAU | | | | |
| Glutamic acid | Glu | E | GAA | GAG | | | | |
| Phenylalanine | Phe | F | UUC | UUU | | | | |
| Glycine | Gly | G | GGA | GGC | GGG | GGU | | |
| Histidine | His | H | CAC | CAU | | | | |
| Isoleucine | Ile | I | AUA | AUC | AUU | | | |
| Lysine | Lys | K | AAA | AAG | | | | |
| Leucine | Leu | L | UUA | UUG | CUA | CUC | CUG | CUU |
| Methionine | Met | M | AUG | | | | | |
| Asparagine | Asn | N | AAC | AAU | | | | |
| Proline | Pro | P | CCA | CCC | CCG | CCU | | |
| Glutamine | Gln | Q | CAA | CAG | | | | |
| Arginine | Arg | R | AGA | AGG | CGA | CGC | CGG | CGU |
| Serine | Ser | S | AGC | AGU | UCA | UCC | UCG | UCU |
| Threonine | Thr | T | ACA | ACC | ACG | ACU | | |
| Valine | Val | V | GUA | GUC | GUG | GUU | | |
| Tryptophan | Trp | W | UGG | | | | | |
| Tyrosine | Tyr | Y | UAC | UAU | | | | |

[1194] In making such changes, the hydropathic index of amino acids may be considered. The importance of the hydropathic amino acid index in conferring interactive biologic function on a protein is generally understood in the art (Kyte and Doolittle, 1982, incorporated herein by reference). It is accepted that the relative hydropathic character of the amino acid contributes to the secondary structure of the resultant protein, which in turn defines the interaction of the protein with other molecules, for example, enzymes, substrates, receptors, DNA, antibodies, antigens, and the like. Each amino acid has been assigned a hydropathic index on the basis of its hydrophobicity and charge characteristics (Kyte and Doolittle, 1982). These values are: isoleucine (+4.5); valine (+4.2); leucine (+3.8); phenylalanine (+2.8); cysteine/cystine (+2.5); methionine (+1.9); alanine (+1.8); glycine (−0.4); threonine (−0.7); serine (−0.8); tryptophan (−0.9); tyrosine (−1.3); proline (−1.6); histidine (−3.2); glutamate (-3.5); glutamine (−3.5); aspartate (−3.5); asparagine (−3.5); lysine (−3.9); and arginine (−4.5).

[1195] It is known in the art that certain amino acids may be substituted by other amino acids having a similar hydropathic index or score and still result in a protein with similar biological activity, i.e. still obtain a biological functionally equivalent protein. In making such changes, the substitution of amino acids whose hydropathic indices are within ±2 is preferred, those within ±1 are particularly preferred, and those within ±0.5 are even more particularly preferred. It is also understood in the art that the substitution of like amino acids can be made effectively on the basis of hydrophilicity. U.S. Pat. No. 4,554,101 (specifically incorporated herein by reference in its entirety), states that the greatest local average hydrophilicity of a protein, as governed by the hydrophilicity of its adjacent amino acids, correlates with a biological property of the protein.

[1196] As detailed in U.S. Pat. No. 4,554,101, the following hydrophilicity values have been assigned to amino acid residues: arginine (+3.0); lysine (+3.0); aspartate (+3.0±1); glutamate (+3.0±1); serine (+0.3); asparagine (+0.2); glutamine (+0.2); glycine (0); threonine (−0.4); proline (−0.5±1); alanine (−0.5); histidine (−0.5); cysteine (−1.0); methionine (−1.3); valine (−1.5); leucine (−1.8); isoleucine (−1.8); tyrosine (−2.3); phenylalanine (−2.5); tryptophan (−3.4). It is understood that an amino acid can be substituted for another having a similar hydrophilicity value and still obtain a biologically equivalent, and in particular, an immunologically equivalent protein. In such changes, the substitution of amino acids whose hydrophilicity values are within±2 is preferred, those within ±1 are particularly preferred, and those within ±0.5 are even more particularly preferred.

[1197] As outlined above, amino acid substitutions are generally therefore based on the relative similarity of the amino acid side-chain substituents, for example, their hydrophobicity, hydrophilicity, charge, size, and the like. Exemplary substitutions that take various of the foregoing characteristics into consideration are well known to those of skill in the art and include: arginine and lysine; glutamate and aspartate; serine and threonine; glutamine and asparagine; and valine, leucine and isoleucine.

[1198] In addition, any polynucleotide may be further modified to increase stability in vivo. Possible modifications include, but are not limited to, the addition of flanking sequences at the 5′ and/or 3′ ends; the use of phosphorothioate or 2′ O-methyl rather than phosphodiesterase linkages in the backbone; and/or the inclusion of nontraditional bases such as inosine, queosine and wybutosine, as well as acetyl-methyl-, thio- and other modified forms of adenine, cytidine, guanine, thymine and uridine.

[1199] Amino acid substitutions may further be made on the basis of similarity in polarity, charge, solubility, hydrophobicity, hydrophilicity and/or the amphipathic nature of the residues. For example, negatively charged amino acids include aspartic acid and glutamic acid; positively charged amino acids include lysine and arginine; and amino acids with uncharged polar head groups having similar hydrophilicity values include leucine, isoleucine and valine; glycine and alanine; asparagine and glutamine; and serine, threonine, phenylalanine and tyrosine. Other groups of amino acids that may represent conservative changes include: (1) ala, pro, gly, glu, asp, gln, asn, ser, thr; (2) cys, ser, tyr, thr; (3) val, ile, leu, met, ala, phe; (4) lys, arg, his; and (5) phe, tyr, trp, his. A variant may also, or alternatively, contain nonconservative changes. In a preferred embodiment, variant polypeptides differ from a native sequence by substitution, deletion or addition of five amino acids or fewer. Variants may also (or alternatively) be modified by, for example, the deletion or addition of amino acids that have minimal influence on the immunogenicity, secondary structure and hydropathic nature of the polypeptide.

[1200] As noted above, polypeptides may comprise a signal (or leader) sequence at the N-terminal end of the protein, which co-translationally or post-translationally directs transfer of the protein. The polypeptide may also be conjugated to a linker or other sequence for ease of synthesis, purification or identification of the polypeptide (e.g., poly-His), or to enhance binding of the polypeptide to a solid support. For example, a polypeptide may be conjugated to an immunoglobulin Fc region.

[1201] When comparing polypeptide sequences, two sequences are said to be “identical” if the sequence of amino acids in the two sequences is the same when aligned for maximum correspondence, as described below. Comparisons between two sequences are typically performed by comparing the sequences over a comparison window to identify and compare local regions of sequence similarity. A “comparison window” as used herein, refers to a segment of at least about 20 contiguous positions, usually 30 to about 75, 40 to about 50, in which a sequence may be compared to a reference sequence of the same number of contiguous positions after the two sequences are optimally aligned.

[1202] Optimal alignment of sequences for comparison may be conducted using the Megalign program in the Lasergene suite of bioinformatics software (DNASTAR, Inc., Madison, Wis.), using default parameters. This program embodies several alignment schemes described in the following references: Dayhoff, M. O. (1978) A model of evolutionary change in proteins—Matrices for detecting distant relationships. In Dayhoff, M. O. (ed.) Atlas of Protein Sequence and Structure, National Biomedical Research Foundation, Washington DC Vol. 5, Suppl. 3, pp. 345-358; Hein J. (1990) Unified Approach to Alignment and Phylogenes pp. 626-645 Methods in Enzymology vol. 183, Academic Press, Inc., San Diego, Calif.; Higgins, D. G. and Sharp, P. M. (1989) CABIOS 5:151-153; Myers, E. W. and Muller W. (1988) CABIOS 4:11-17; Robinson, E. D. (1971) Comb. Theor 11:105; Saitou, N. Nei, M. (1987) Mol. Biol. Evol. 4:406-425; Sneath, P. H. A. and Sokal, R. R. (1973) Numerical Taxonomy—the Principles and Practice of Numerical Taxonomy, Freeman Press, San Francisco, Calif.; Wilbur, W. J. and Lipman, D. J. (1983) Proc. Natl. Acad., Sci. USA 80:726-730.

[1203] Alternatively, optimal alignment of sequences for comparison may be conducted by the local identity algorithm of Smith and Waterman (1981) Add. APL. Math 2:482, by the identity alignment algorithm of Needleman and Wunsch (1970) J. Mol. Biol. 48:443, by the search for similarity methods of Pearson and Lipman (1988) Proc. Natl. Acad. Sci. USA 85: 2444, by computerized implementations of these algorithms (GAP, BESTFIT, BLAST, FASTA, and TFASTA in the Wisconsin Genetics Software Package, Genetics Computer Group (GCG), 575 Science Dr., Madison, Wis.), or by inspection.

[1204] One preferred example of algorithms that are suitable for determining percent sequence identity and sequence similarity are the BLAST and BLAST 2.0 algorithms, which are described in Altschul et al. (1977) Nucl. Acids Res. 25:3389-3402 and Altschul et al. (1990) J. Mol. Biol. 215:403-410, respectively. BLAST and BLAST 2.0 can be used, for example with the parameters described herein, to determine percent sequence identity for the polynucleotides and polypeptides of the invention. Software for performing BLAST analyses is publicly available through the National Center for Biotechnology Information. For amino acid sequences, a scoring matrix can be used to calculate the cumulative score. Extension of the word hits in each direction are halted when: the cumulative alignment score falls off by the quantity X from its maximum achieved value; the cumulative score goes to zero or below, due to the accumulation of one or more negative-scoring residue alignments; or the end of either sequence is reached. The BLAST algorithm parameters W, T and X determine the sensitivity and speed of the alignment.

[1205] In one preferred approach, the “percentage of sequence identity” is determined by comparing two optimally aligned sequences over a window of comparison of at least 20 positions, wherein the portion of the polypeptide sequence in the comparison window may comprise additions or deletions (i.e., gaps) of 20 percent or less, usually 5 to 15 percent, or 10 to 12 percent, as compared to the reference sequences (which does not comprise additions or deletions) for optimal alignment of the two sequences. The percentage is calculated by determining the number of positions at which the identical amino acid residue occurs in both sequences to yield the number of matched positions, dividing the number of matched positions by the total number of positions in the reference sequence (i.e., the window size) and multiplying the results by 100 to yield the percentage of sequence identity.

[1206] Within other illustrative embodiments, a polypeptide may be a xenogeneic polypeptide that comprises an polypeptide having substantial sequence identity, as described above, to the human polypeptide (also termed autologous antigen) which served as a reference polypeptide, but which xenogeneic polypeptide is derived from a different, non-human species. One skilled in the art will recognize that “self”antigens are often poor stimulators of CD8+ and CD4+ T-lymphocyte responses, and therefore efficient immunotherapeutic strategies directed against tumor polypeptides require the development of methods to overcome immune tolerance to particular self tumor polypeptides. For example, humans immunized with prostase protein from a xenogeneic (non human) origin are capable of mounting an immune response against the counterpart human protein, e.g. the human prostase tumor protein present on human tumor cells. Accordingly, the present invention provides methods for purifying the xenogeneic form of the tumor proteins set forth herein, such as the polypeptides set forth in SEQ ID NOs: 1422-1424, 1426, 1428, and 1429, or those encoded by polynucleotide sequences set forth in SEQ ID NOs: 1-1421, 1425, 1427, and 1430-3417.

[1207] Therefore, one aspect of the present invention provides xenogeneic variants of the polypeptide compositions described herein. Such xenogeneic variants generally encompassed by the present invention will typically exhibit at least about 70%, 75%, 80%, 85%, 90%, 91%, 92%, 93%, 94%, 95%, 96%, 97%, 98%, or 99% or more identity along their lengths, to a polypeptide sequences set forth herein.

[1208] More particularly, the invention is directed to mouse, rat, monkey, porcine and other non-human polypeptides which can be used as xenogeneic forms of human polypeptides set forth herein, to induce immune responses directed against tumor polypeptides of the invention.

[1209] Within other illustrative embodiments, a polypeptide may be a fusion polypeptide that comprises multiple polypeptides as described herein, or that comprises at least one polypeptide as described herein and an unrelated sequence, such as a known tumor protein. A fusion partner may, for example, assist in providing T helper epitopes (an immunological fusion partner), preferably T helper epitopes recognized by humans, or may assist in expressing the protein (an expression enhancer) at higher yields than the native recombinant protein. Certain preferred fusion partners are both immunological and expression enhancing fusion partners. Other fusion partners may be selected so as to increase the solubility of the polypeptide or to enable the polypeptide to be targeted to desired intracellular compartments. Still further fusion partners include affinity tags, which facilitate purification of the polypeptide.

[1210] Fusion polypeptides may generally be prepared using standard techniques, including chemical conjugation. Preferably, a fusion polypeptide is expressed as a recombinant polypeptide, allowing the production of increased levels, relative to a non-fused polypeptide, in an expression system. Briefly, DNA sequences encoding the polypeptide components may be assembled separately, and ligated into an appropriate expression vector. The 3′ end of the DNA sequence encoding one polypeptide component is ligated, with or without a peptide linker, to the 5′ end of a DNA sequence encoding the second polypeptide component so that the reading frames of the sequences are in phase. This permits translation into a single fusion polypeptide that retains the biological activity of both component polypeptides.

[1211] A peptide linker sequence may be employed to separate the first and second polypeptide components by a distance sufficient to ensure that each polypeptide folds into its secondary and tertiary structures. Such a peptide linker sequence is incorporated into the fusion polypeptide using standard techniques well known in the art. Suitable peptide linker sequences may be chosen based on the following factors: (1) their ability to adopt a flexible extended conformation; (2) their inability to adopt a secondary structure that could interact with functional epitopes on the first and second polypeptides; and (3) the lack of hydrophobic or charged residues that might react with the polypeptide functional epitopes. Preferred peptide linker sequences contain Gly, Asn and Ser residues. Other near neutral amino acids, such as Thr and Ala may also be used in the linker sequence. Amino acid sequences which may be usefully employed as linkers include those disclosed in Maratea et al., Gene 40:39-46, 1985; Murphy et al., Proc. Natl. Acad. Sci. USA 83:8258-8262, 1986; U.S. Pat. No. 4,935,233 and U.S. Pat. No. 4,751,180. The linker sequence may generally be from 1 to about 50 amino acids in length. Linker sequences are not required when the first and second polypeptides have non-essential N-terminal amino acid regions that can be used to separate the functional domains and prevent steric interference.

[1212] The ligated DNA sequences are operably linked to suitable transcriptional or translational regulatory elements. The regulatory elements responsible for expression of DNA are located only 5′ to the DNA sequence encoding the first polypeptides. Similarly, stop codons required to end translation and transcription termination signals are only present 3′ to the DNA sequence encoding the second polypeptide.

[1213] The fusion polypeptide can comprise a polypeptide as described herein together with an unrelated immunogenic protein, such as an immunogenic protein capable of eliciting a recall response. Examples of such proteins include tetanus, tuberculosis and hepatitis proteins (see, for example, Stoute et al. New Engl. J. Med., 336:86-91, 1997).

[1214] In one preferred embodiment, the immunological fusion partner is derived from a Mycobacterium sp., such as a Mycobacterium tuberculosis-derived Ral2 fragment. Ral2 compositions and methods for their use in enhancing the expression and/or immunogenicity of heterologous polynucleotide/polypeptide sequences is described in U.S. patent application Ser. No. 60/158,585, the disclosure of which is incorporated herein by reference in its entirety. Briefly, Ra12 refers to a polynucleotide region that is a subsequence of a Mycobacterium tuberculosis MTB32A nucleic acid. MTB32A is a serine protease of 32 KD molecular weight encoded by a gene in virulent and avirulent strains of M. tuberculosis. The nucleotide sequence and amino acid sequence of MTB32A have been described (for example, U.S. patent application Ser. No. 60/158,585; see also, Skeiky et al., Infection and Immun. (1999) 67:3998-4007, incorporated herein by reference). C-terminal fragments of the MTB32A coding sequence express at high levels and remain as a soluble polypeptides throughout the purification process. Moreover, Ra12 may enhance the immunogenicity of heterologous immunogenic polypeptides with which it is fused. One preferred Ra12 fusion polypeptide comprises a 14 KD C-terminal fragment corresponding to amino acid residues 192 to 323 of MTB32A. Other preferred Ra12 polynucleotides generally comprise at least about 15 consecutive nucleotides, at least about 30 nucleotides, at least about 60 nucleotides, at least about 100 nucleotides, at least about 200 nucleotides, or at least about 300 nucleotides that encode a portion of a Ra12 polypeptide. Ra12 polynucleotides may comprise a native sequence (i.e., an endogenous sequence that encodes a Ra12 polypeptide or a portion thereof) or may comprise a variant of such a sequence. Ra12 polynucleotide variants may contain one or more substitutions, additions, deletions and/or insertions such that the biological activity of the encoded fusion polypeptide is not substantially diminished, relative to a fusion polypeptide comprising a native Ra12 polypeptide. Variants preferably exhibit at least about 70% identity, more preferably at least about 80% identity and most preferably at least about 90% identity to a polynucleotide sequence that encodes a native Ra12 polypeptide or a portion thereof.

[1215] Within other preferred embodiments, an immunological fusion partner is derived from protein D, a surface protein of the gram-negative bacterium Haemophilus influenza B (WO 91/18926). Preferably, a protein D derivative comprises approximately the first third of the protein (e.g., the first N-terminal 100-110 amino acids), and a protein D derivative may be lipidated. Within certain preferred embodiments, the first 109 residues of a Lipoprotein D fusion partner is included on the N-terminus to provide the polypeptide with additional exogenous T-cell epitopes and to increase the expression level in E. coli (thus functioning as an expression enhancer). The lipid tail ensures optimal presentation of the antigen to antigen presenting cells. Other fusion partners include the non-structural protein from influenzae virus, NS1 (hemaglutinin). Typically, the N-terminal 81 amino acids are used, although different fragments that include T-helper epitopes may be used.

[1216] In another embodiment, the immunological fusion partner is the protein known as LYTA, or a portion thereof (preferably a C-terminal portion). LYTA is derived from Streptococcus pneumoniae, which synthesizes an N-acetyl-L-alanine amidase known as amidase LYTA (encoded by the LytA gene; Gene 43:265-292, 1986). LYTA is an autolysin that specifically degrades certain bonds in the peptidoglycan backbone. The C-terminal domain of the LYTA protein is responsible for the affinity to the choline or to some choline analogues such as DEAE. This property has been exploited for the development of E. coli C-LYTA expressing plasmids useful for expression of fusion proteins. Purification of hybrid proteins containing the C-LYTA fragment at the amino terminus has been described (see Biotechnology 10:795-798, 1992). Within a preferred embodiment, a repeat portion of LYTA may be incorporated into a fusion polypeptide. A repeat portion is found in the C-terminal region starting at residue 178. A particularly preferred repeat portion incorporates residues 188-305.

[1217] Yet another illustrative embodiment involves fusion polypeptides, and the polynucleotides encoding them, wherein the fusion partner comprises a targeting signal capable of directing a polypeptide to the endosomal/lysosomal compartment, as described in U.S. Pat. No. 5,633,234. An immunogenic polypeptide of the invention, when fused with this targeting signal, will associate more efficiently with MHC class II molecules and thereby provide enhanced in vivo stimulation of CD4⁺ T-cells specific for the polypeptide.

[1218] Polypeptides of the invention are prepared using any of a variety of well known synthetic and/or recombinant techniques, the latter of which are further described below. Polypeptides, portions and other variants generally less than about 150 amino acids can be generated by synthetic means, using techniques well known to those of ordinary skill in the art. In one illustrative example, such polypeptides are synthesized using any of the commercially available solid-phase techniques, such as the Merrifield solid-phase synthesis method, where amino acids are sequentially added to a growing amino acid chain. See Merrifield, J. Am. Chem. Soc. 85:2149-2146, 1963. Equipment for automated synthesis of polypeptides is commercially available from suppliers such as Perkin Elmer/Applied BioSystems Division (Foster City, Calif.), and may be operated according to the manufacturer's instructions.

[1219] In general, polypeptide compositions (including fusion polypeptides) of the invention are isolated. An “isolated” polypeptide is one that is removed from its original environment. For example, a naturally-occurring protein or polypeptide is isolated if it is separated from some or all of the coexisting materials in the natural system. Preferably, such polypeptides are also purified, e.g., are at least about 90% pure, more preferably at least about 95% pure and most preferably at least about 99% pure.

[1220] Polynucleotide Compositions

[1221] The present invention, in other aspects, provides polynucleotide compositions. The terms “DNA” and “polynucleotide” are used essentially interchangeably herein to refer to a DNA molecule that has been isolated free of total genomic DNA of a particular species. “Isolated,” as used herein, means that a polynucleotide is substantially away from other coding sequences, and that the DNA molecule does not contain large portions of unrelated coding DNA, such as large chromosomal fragments or other functional genes or polypeptide coding regions. Of course, this refers to the DNA molecule as originally isolated, and does not exclude genes or coding regions later added to the segment by the hand of man.

[1222] As will be understood by those skilled in the art, the polynucleotide compositions of this invention can include genomic sequences, extra-genomic and plasmid-encoded sequences and smaller engineered gene segments that express, or may be adapted to express, proteins, polypeptides, peptides and the like. Such segments may be naturally isolated, or modified synthetically by the hand of man.

[1223] As will be also recognized by the skilled artisan, polynucleotides of the invention may be single-stranded (coding or antisense) or double-stranded, and may be DNA (genomic, cDNA or synthetic) or RNA molecules. RNA molecules may include HnRNA molecules, which contain introns and correspond to a DNA molecule in a one-to-one manner, and mRNA molecules, which do not contain introns. Additional coding or non-coding sequences may, but need not, be present within a polynucleotide of the present invention, and a polynucleotide may, but need not, be linked to other molecules and/or support materials.

[1224] Polynucleotides may comprise a native sequence (i.e., an endogenous sequence that encodes a polypeptide/protein of the invention or a portion thereof) or may comprise a sequence that encodes a variant or derivative, preferably and immunogenic variant or derivative, of such a sequence.

[1225] Therefore, according to another aspect of the present invention, polynucleotide compositions are provided that comprise some or all of a polynucleotide sequence set forth in any one of SEQ ID NOs: 1-1421, 1425, 1427, and 1430-3417, complements of a polynucleotide sequence set forth in any one of SEQ ID NOs: 1-1421, 1425, 1427, and 1430-3417, and degenerate variants of a polynucleotide sequence set forth in any one of SEQ ID NOs: 1-1421, 1425, 1427, and 1430 2417. In certain preferred embodiments, the polynucleotide sequences set forth herein encode immunogenic polypeptides, as described above.

[1226] In other related embodiments, the present invention provides polynucleotide variants having substantial identity to the sequences disclosed herein in SEQ ID NOs: 1-1421, 1425, 1427, and 1430-3417, for example those comprising at least 70% sequence identity, preferably at least 75%, 80%, 85%, 90%, 95%, 96%, 97%, 98%, or 99% or higher, sequence identity compared to a polynucleotide sequence of this invention using the methods described herein, (e.g., BLAST analysis using standard parameters, as described below). One skilled in this art will recognize that these values can be appropriately adjusted to determine corresponding identity of proteins encoded by two nucleotide sequences by taking into account codon degeneracy, amino acid similarity, reading frame positioning and the like.

[1227] Typically, polynucleotide variants will contain one or more substitutions, additions, deletions and/or insertions, preferably such that the immunogenicity of the polypeptide encoded by the variant polynucleotide is not substantially diminished relative to a polypeptide encoded by a polynucleotide sequence specifically set forth herein). The term “variants” should also be understood to encompasses homologous genes of xenogenic origin.

[1228] In additional embodiments, the present invention provides polynucleotide fragments comprising or consisting of various lengths of contiguous stretches of sequence identical to or complementary to one or more of the sequences disclosed herein. For example, polynucleotides are provided by this invention that comprise or consist of at least about 10, 15, 20, 30, 40, 50, 75, 100, 150, 200, 300, 400, 500 or 1000 or more contiguous nucleotides of one or more of the sequences disclosed herein as well as all intermediate lengths there between. It will be readily understood that “intermediate lengths”, in this context, means any length between the quoted values, such as 16, 17, 18, 19, etc.; 21, 22, 23, etc.; 30, 31, 32, etc.; 50, 51, 52, 53, etc.; 100, 101, 102, 103, etc.; 150, 151, 152, 153, etc.; including all integers through 200-500; 500-1,000, and the like. A polynucleotide sequence as described here may be extended at one or both ends by additional nucleotides not found in the native sequence. This additional sequence may consist of 1, 2, 3, 4, 5, 6, 7, 8, 9, 10, 11, 12, 13, 14, 15, 16, 17, 18, 19, or 20 nucleotides at either end of the disclosed sequence or at both ends of the disclosed sequence.

[1229] In another embodiment of the invention, polynucleotide compositions are provided that are capable of hybridizing under moderate to high stringency conditions to a polynucleotide sequence provided herein, or a fragment thereof, or a complementary sequence thereof. Hybridization techniques are well known in the art of molecular biology. For purposes of illustration, suitable moderately stringent conditions for testing the hybridization of a polynucleotide of this invention with other polynucleotides include prewashing in a solution of 5×SSC, 0.5% SDS, 1.0 mM EDTA (pH 8.0); hybridizing at 50° C.-60° C., 5×SSC, overnight; followed by washing twice at 65° C. for 20 minutes with each of 2×, 0.5× and 0.2×SSC containing 0.1% SDS. One skilled in the art will understand that the stringency of hybridization can be readily manipulated, such as by altering the salt content of the hybridization solution and/or the temperature at which the hybridization is performed. For example, in another embodiment, suitable highly stringent hybridization conditions include those described above, with the exception that the temperature of hybridization is increased, e.g., to 60-65° C. or 65-70° C.

[1230] In certain preferred embodiments, the polynucleotides described above, e.g., polynucleotide variants, fragments and hybridizing sequences, encode polypeptides that are immunologically cross-reactive with a polypeptide sequence specifically set forth herein. In other preferred embodiments, such polynucleotides encode polypeptides that have a level of immunogenic activity of at least about 50%, preferably at least about 70%, and more preferably at least about 90% of that for a polypeptide sequence specifically set forth herein.

[1231] The polynucleotides of the present invention, or fragments thereof, regardless of the length of the coding sequence itself, may be combined with other DNA sequences, such as promoters, polyadenylation signals, additional restriction enzyme sites, multiple cloning sites, other coding segments, and the like, such that their overall length may vary considerably. It is therefore contemplated that a nucleic acid fragment of almost any length may be employed, with the total length preferably being limited by the ease of preparation and use in the intended recombinant DNA protocol. For example, illustrative polynucleotide segments with total lengths of about 10,000, about 5000, about 3000, about 2,000, about 1,000, about 500, about 200, about 100, about 50 base pairs in length, and the like, (including all intermediate lengths) are contemplated to be useful in many implementations of this invention.

[1232] When comparing polynucleotide sequences, two sequences are said to be “identical” if the sequence of nucleotides in the two sequences is the same when aligned for maximum correspondence, as described below. Comparisons between two sequences are typically performed by comparing the sequences over a comparison window to identify and compare local regions of sequence similarity. A “comparison window” as used herein, refers to a segment of at least about 20 contiguous positions, usually 30 to about 75, 40 to about 50, in which a sequence may be compared to a reference sequence of the same number of contiguous positions after the two sequences are optimally aligned.

[1233] Optimal alignment of sequences for comparison may be conducted using the Megalign program in the Lasergene suite of bioinformatics software (DNASTAR, Inc., Madison, Wis.), using default parameters. This program embodies several alignment schemes described in the following references: Dayhoff, M. O. (1978) A model of evolutionary change in proteins—Matrices for detecting distant relationships. In Dayhoff, M.O. (ed.) Atlas of Protein Sequence and Structure, National Biomedical Research Foundation, Washington DC Vol. 5, Suppl. 3, pp. 345-358; Hein J. (1990) Unified Approach to Alignment and Phylogenes pp. 626-645 Methods in Enzymology vol. 183, Academic Press, Inc., San Diego, Calif.; Higgins, D. G. and Sharp, P. M. (1989) CABIOS 5:151-153; Myers, E. W. and Muller W. (1988) CABIOS 4:11-17; Robinson, E. D. (1971) Comb. Theor 11:105; Santou, N. Nes, M. (1987) Mol. Biol. Evol. 4:406-425; Sneath, P. H .A. and Sokal, R. R. (1973) Numerical Taxonomy—the Principles and Practice of Numerical Taxonomy, Freeman Press, San Francisco, Calif.; Wilbur, W. J. and Lipman, D. J. (1983) Proc. Natl. Acad., Sci. USA 80:726-730.

[1234] Alternatively, optimal alignment of sequences for comparison may be conducted by the local identity algorithm of Smith and Waterman (1981) Add. APL. Math 2:482, by the identity alignment algorithm of Needleman and Wunsch (1970) J. Mol. Biol. 48:443, by the search for similarity methods of Pearson and Lipman (1988) Proc. Natl. Acad. Sci. USA 85: 2444, by computerized implementations of these algorithms (GAP, BESTFIT, BLAST, FASTA, and TFASTA in the Wisconsin Genetics Software Package, Genetics Computer Group (GCG), 575 Science Dr., Madison, Wis.), or by inspection.

[1235] One preferred example of algorithms that are suitable for determining percent sequence identity and sequence similarity are the BLAST and BLAST 2.0 algorithms, which are described in Altschul et al. (1977) Nucl. Acids Res. 25:3389-3402 and Altschul et al. (1990) J. Mol. Biol. 215:403-410, respectively. BLAST and BLAST 2.0 can be used, for example with the parameters described herein, to determine percent sequence identity for the polynucleotides of the invention. Software for performing BLAST analyses is publicly available through the National Center for Biotechnology Information. In one illustrative example, cumulative scores can be calculated using, for nucleotide sequences, the parameters M (reward score for a pair of matching residues; always >0) and N (penalty score for mismatching residues; always <0). Extension of the word hits in each direction are halted when: the cumulative alignment score falls off by the quantity X from its maximum achieved value; the cumulative score goes to zero or below, due to the accumulation of one or more negative-scoring residue alignments; or the end of either sequence is reached. The BLAST algorithm parameters W, T and X determine the sensitivity and speed of the alignment. The BLASTN program (for nucleotide sequences) uses as defaults a wordlength (W) of 11, and expectation (E) of 10, and the BLOSUM62 scoring matrix (see Henikoff and Henikoff (1989) Proc. Natl. Acad. Sci. USA 89:10915) alignments, (B) of 50, expectation (E) of 10, M=5, N=4 and a comparison of both strands.

[1236] Preferably, the “percentage of sequence identity” is determined by comparing two optimally aligned sequences over a window of comparison of at least 20 positions, wherein the portion of the polynucleotide sequence in the comparison window may comprise additions or deletions (i.e., gaps) of 20 percent or less, usually 5 to 15 percent, or 10 to 12 percent, as compared to the reference sequences (which does not comprise additions or deletions) for optimal alignment of the two sequences. The percentage is calculated by determining the number of positions at which the identical nucleic acid bases occurs in both sequences to yield the number of matched positions, dividing the number of matched positions by the total number of positions in the reference sequence (i.e., the window size) and multiplying the results by 100 to yield the percentage of sequence identity.

[1237] It will be appreciated by those of ordinary skill in the art that, as a result of the degeneracy of the genetic code, there are many nucleotide sequences that encode a polypeptide as described herein. Some of these polynucleotides bear minimal homology to the nucleotide sequence of any native gene. Nonetheless, polynucleotides that vary due to differences in codon usage are specifically contemplated by the present invention. Further, alleles of the genes comprising the polynucleotide sequences provided herein are within the scope of the present invention. Alleles are endogenous genes that are altered as a result of one or more mutations, such as deletions, additions and/or substitutions of nucleotides. The resulting mRNA and protein may, but need not, have an altered structure or function. Alleles may be identified using standard techniques (such as hybridization, amplification and/or database sequence comparison).

[1238] Therefore, in another embodiment of the invention, a mutagenesis approach, such as site-specific mutagenesis, is employed for the preparation of immunogenic variants and/or derivatives of the polypeptides described herein. By this approach, specific modifications in a polypeptide sequence can be made through mutagenesis of the underlying polynucleotides that encode them. These techniques provides a straightforward approach to prepare and test sequence variants, for example, incorporating one or more of the foregoing considerations, by introducing one or more nucleotide sequence changes into the polynucleotide.

[1239] Site-specific mutagenesis allows the production of mutants through the use of specific oligonucleotide sequences which encode the DNA sequence of the desired mutation, as well as a sufficient number of adjacent nucleotides, to provide a primer sequence of sufficient size and sequence complexity to form a stable duplex on both sides of the deletion junction being traversed. Mutations may be employed in a selected polynucleotide sequence to improve, alter, decrease, modify, or otherwise change the properties of the polynucleotide itself, and/or alter the properties, activity, composition, stability, or primary sequence of the encoded polypeptide.

[1240] In certain embodiments of the present invention, the inventors contemplate the mutagenesis of the disclosed polynucleotide sequences to alter one or more properties of the encoded polypeptide, such as the immunogenicity of a polypeptide vaccine. The techniques of site-specific mutagenesis are well-known in the art, and are widely used to create variants of both polypeptides and polynucleotides. For example, site-specific mutagenesis is often used to alter a specific portion of a DNA molecule. In such embodiments, a primer comprising typically about 14 to about 25 nucleotides or so in length is employed, with about 5 to about 10 residues on both sides of the junction of the sequence being altered.

[1241] As will be appreciated by those of skill in the art, site-specific mutagenesis techniques have often employed a phage vector that exists in both a single stranded and double stranded form. Typical vectors useful in site-directed mutagenesis include vectors such as the M13 phage. These phage are readily commercially-available and their use is generally well-known to those skilled in the art. Double-stranded plasmids are also routinely employed in site directed mutagenesis that eliminates the step of transferring the gene of interest from a plasmid to a phage.

[1242] In general, site-directed mutagenesis in accordance herewith is performed by first obtaining a single-stranded vector or melting apart of two strands of a double-stranded vector that includes within its sequence a DNA sequence that encodes the desired peptide. An oligonucleotide primer bearing the desired mutated sequence is prepared, generally synthetically. This primer is then annealed with the single-stranded vector, and subjected to DNA polymerizing enzymes such as E. coli polymerase I Klenow fragment, in order to complete the synthesis of the mutation-bearing strand. Thus, a heteroduplex is formed wherein one strand encodes the original non-mutated sequence and the second strand bears the desired mutation. This heteroduplex vector is then used to transform appropriate cells, such as E. coli cells, and clones are selected which include recombinant vectors bearing the mutated sequence arrangement.

[1243] The preparation of sequence variants of the selected peptide-encoding DNA segments using site-directed mutagenesis provides a means of producing potentially useful species and is not meant to be limiting as there are other ways in which sequence variants of peptides and the DNA sequences encoding them may be obtained. For example, recombinant vectors encoding the desired peptide sequence may be treated with mutagenic agents, such as hydroxylamine, to obtain sequence variants. Specific details regarding these methods and protocols are found in the teachings of Maloy et al., 1994; Segal, 1976; Prokop and Bajpai, 1991; Kuby, 1994; and Maniatis et al., 1982, each incorporated herein by reference, for that purpose.

[1244] As used herein, the term “oligonucleotide directed mutagenesis procedure” refers to template-dependent processes and vector-mediated propagation which result in an increase in the concentration of a specific nucleic acid molecule relative to its initial concentration, or in an increase in the concentration of a detectable signal, such as amplification. As used herein, the term “oligonucleotide directed mutagenesis procedure” is intended to refer to a process that involves the template-dependent extension of a primer molecule. The term template dependent process refers to nucleic acid synthesis of an RNA or a DNA molecule wherein the sequence of the newly synthesized strand of nucleic acid is dictated by the well-known rules of complementary base pairing (see, for example, Watson, 1987). Typically, vector mediated methodologies involve the introduction of the nucleic acid fragment into a DNA or RNA vector, the clonal amplification of the vector, and the recovery of the amplified nucleic acid fragment. Examples of such methodologies are provided by U.S. Pat. No. 4,237,224, specifically incorporated herein by reference in its entirety.

[1245] In another approach for the production of polypeptide variants of the present invention, recursive sequence recombination, as described in U.S. Pat. No. 5,837,458, may be employed. In this approach, iterative cycles of recombination and screening or selection are performed to “evolve” individual polynucleotide variants of the invention having, for example, enhanced immunogenic activity.

[1246] In other embodiments of the present invention, the polynucleotide sequences provided herein can be advantageously used as probes or primers for nucleic acid hybridization. As such, it is contemplated that nucleic acid segments that comprise or consist of a sequence region of at least about a 15 nucleotide long contiguous sequence that has the same sequence as, or is complementary to, a 15 nucleotide long contiguous sequence disclosed herein will find particular utility. Longer contiguous identical or complementary sequences, e.g., those of about 20, 30, 40, 50, 100, 200, 500, 1000 (including all intermediate lengths) and even up to full length sequences will also be of use in certain embodiments.

[1247] The ability of such nucleic acid probes to specifically hybridize to a sequence of interest will enable them to be of use in detecting the presence of complementary sequences in a given sample. However, other uses are also envisioned, such as the use of the sequence information for the preparation of mutant species primers, or primers for use in preparing other genetic constructions.

[1248] Polynucleotide molecules having sequence regions consisting of contiguous nucleotide stretches of 10-14, 15-20, 30, 50, or even of 100-200 nucleotides or so (including intermediate lengths as well), identical or complementary to a polynucleotide sequence disclosed herein, are particularly contemplated as hybridization probes for use in, e.g., Southern and Northern blotting. This would allow a gene product, or fragment thereof, to be analyzed, both in diverse cell types and also in various bacterial cells. The total size of fragment, as well as the size of the complementary stretch(es), will ultimately depend on the intended use or application of the particular nucleic acid segment. Smaller fragments will generally find use in hybridization embodiments, wherein the length of the contiguous complementary region may be varied, such as between about 15 and about 100 nucleotides, but larger contiguous complementarity stretches may be used, according to the length complementary sequences one wishes to detect.

[1249] The use of a hybridization probe of about 15-25 nucleotides in length allows the formation of a duplex molecule that is both stable and selective. Molecules having contiguous complementary sequences over stretches greater than 15 bases in length are generally preferred, though, in order to increase stability and selectivity of the hybrid, and thereby improve the quality and degree of specific hybrid molecules obtained. One will generally prefer to design nucleic acid molecules having gene-complementary stretches of 15 to 25 contiguous nucleotides, or even longer where desired.

[1250] Hybridization probes may be selected from any portion of any of the sequences disclosed herein. All that is required is to review the sequences set forth herein, or to any continuous portion of the sequences, from about 15-25 nucleotides in length up to and including the full length sequence, that one wishes to utilize as a probe or primer. The choice of probe and primer sequences may be governed by various factors. For example, one may wish to employ primers from towards the termini of the total sequence.

[1251] Small polynucleotide segments or fragments may be readily prepared by, for example, directly synthesizing the fragment by chemical means, as is commonly practiced using an automated oligonucleotide synthesizer. Also, fragments may be obtained by application of nucleic acid reproduction technology, such as the PCR™ technology of U.S. Pat. No. 4,683,202 (incorporated herein by reference), by introducing selected sequences into recombinant vectors for recombinant production, and by other recombinant DNA techniques generally known to those of skill in the art of molecular biology.

[1252] The nucleotide sequences of the invention may be used for their ability to selectively form duplex molecules with complementary stretches of the entire gene or gene fragments of interest. Depending on the application envisioned, one will typically desire to employ varying conditions of hybridization to achieve varying degrees of selectivity of probe towards target sequence. For applications requiring high selectivity, one will typically desire to employ relatively stringent conditions to form the hybrids, e.g., one will select relatively low salt and/or high temperature conditions, such as provided by a salt concentration of from about 0.02 M to about 0.15 M salt at temperatures of from about 50° C. to about 70° C. Such selective conditions tolerate little, if any, mismatch between the probe and the template or target strand, and would be particularly suitable for isolating related sequences.

[1253] Of course, for some applications, for example, where one desires to prepare mutants employing a mutant primer strand hybridized to an underlying template, less stringent (reduced stringency) hybridization conditions will typically be needed in order to allow formation of the heteroduplex. In these circumstances, one may desire to employ salt conditions such as those of from about 0.15 M to about 0.9 M salt, at temperatures ranging from about 20° C. to about 55° C. Cross-hybridizing species can thereby be readily identified as positively hybridizing signals with respect to control hybridizations. In any case, it is generally appreciated that conditions can be rendered more stringent by the addition of increasing amounts of formamide, which serves to destabilize the hybrid duplex in the same manner as increased temperature. Thus, hybridization conditions can be readily manipulated, and thus will generally be a method of choice depending on the desired results.

[1254] According to another embodiment of the present invention, polynucleotide compositions comprising antisense oligonucleotides are provided. Antisense oligonucleotides have been demonstrated to be effective and targeted inhibitors of protein synthesis, and, consequently, provide a therapeutic approach by which a disease can be treated by inhibiting the synthesis of proteins that contribute to the disease. The efficacy of antisense oligonucleotides for inhibiting protein synthesis is well established. For example, the synthesis of polygalactauronase and the muscarine type 2 acetylcholine receptor are inhibited by antisense oligonucleotides directed to their respective mRNA sequences (U.S. Pat. No. 5,739,119 and U.S. Pat. No. 5,759,829). Further, examples of antisense inhibition have been demonstrated with the nuclear protein cyclin, the multiple drug resistance gene (MDG1), ICAM-1, E-selectin, STK-1, striatal GABA_{A} receptor and human EGF (Jaskulski et al., Science. June 1988, 10;240(4858):1544-6; Vasanthakumar and Ahmed, Cancer Commun. 1989;1(4):225-32; Peris et al., Brain Res Mol Brain Res. June 1998, 15;57(2):310-20; U.S. Pat. No. 5,801,154; U.S. Pat. No. 5,789,573; U.S. Pat. No. 5,718,709 and U.S. Pat. No. 5,610,288). Antisense constructs have also been described that inhibit and can be used to treat a variety of abnormal cellular proliferations, e.g. cancer (U.S. Pat. No. 5,747,470; U.S. Pat. No. 5,591,317 and U.S. Pat. No. 5,783,683).

[1255] Therefore, in certain embodiments, the present invention provides oligonucleotide sequences that comprise all, or a portion of, any sequence that is capable of specifically binding to polynucleotide sequence described herein, or a complement thereof. In one embodiment, the antisense oligonucleotides comprise DNA or derivatives thereof. In another embodiment, the oligonucleotides comprise RNA or derivatives thereof. In a third embodiment, the oligonucleotides are modified DNAs comprising a phosphorothioated modified backbone. In a fourth embodiment, the oligonucleotide sequences comprise peptide nucleic acids or derivatives thereof. In each case, preferred compositions comprise a sequence region that is complementary, and more preferably substantially-complementary, and even more preferably, completely complementary to one or more portions of polynucleotides disclosed herein. Selection of antisense compositions specific for a given gene sequence is based upon analysis of the chosen target sequence and determination of secondary structure, Tₘ, binding energy, and relative stability. Antisense compositions may be selected based upon their relative inability to form dimers, hairpins, or other secondary structures that would reduce or prohibit specific binding to the target mRNA in a host cell. Highly preferred target regions of the mRNA, are those which are at or near the AUG translation initiation codon, and those sequences which are substantially complementary to 5′ regions of the mRNA. These secondary structure analyses and target site selection considerations can be performed, for example, using v.4 of the OLIGO primer analysis software and/or the BLASTN 2.0.5 algorithm software (Altschul et al., Nucleic Acids Res. 1997, 25(17):3389-402).

[1256] The use of an antisense delivery method employing a short peptide vector, termed MPG (27 residues), is also contemplated. The MPG peptide contains a hydrophobic domain derived from the fusion sequence of HIV gp41 and a hydrophilic domain from the nuclear localization sequence of SV40 T-antigen (Morris et al., Nucleic Acids Res. Jul. 15, 1997;25(14):2730-6). It has been demonstrated that several molecules of the MPG peptide coat the antisense oligonucleotides and can be delivered into cultured mammalian cells in less than 1 hour with relatively high efficiency (90%). Further, the interaction with MPG strongly increases both the stability of the oligonucleotide to nuclease and the ability to cross the plasma membrane.

[1257] According to another embodiment of the invention, the polynucleotide compositions described herein are used in the design and preparation of ribozyme molecules for inhibiting expression of the tumor polypeptides and proteins of the present invention in tumor cells. Ribozymes are RNA-protein complexes that cleave nucleic acids in a site-specific fashion. Ribozymes have specific catalytic domains that possess endonuclease activity (Kim and Cech, Proc Natl Acad Sci U S A. December 1987;84(24):8788-92; Forster and Symons, Cell. Apr. 24, 1997;49(2):211-20). For example, a large number of ribozymes accelerate phosphoester transfer reactions with a high degree of specificity, often cleaving only one of several phosphoesters in an oligonucleotide substrate (Cech et al., Cell. December 1981;27(3 Pt 2):487-96; Michel and Westhof, J Mol Biol. Dec. 5, 1990;216(3):585-610; Reinhold-Hurek and Shub, Nature. May 14, 1992;357(6374):173-6). This specificity has been attributed to the requirement that the substrate bind via specific base-pairing interactions to the internal guide sequence (“IGS”) of the ribozyme prior to chemical reaction.

[1258] Six basic varieties of naturally-occurring enzymatic RNAs are known presently. Each can catalyze the hydrolysis of RNA phosphodiester bonds in trans (and thus can cleave other RNA molecules) under physiological conditions. In general, enzymatic nucleic acids act by first binding to a target RNA. Such binding occurs through the target binding portion of a enzymatic nucleic acid which is held in close proximity to an enzymatic portion of the molecule that acts to cleave the target RNA. Thus, the enzymatic nucleic acid first recognizes and then binds a target RNA through complementary base-pairing, and once bound to the correct site, acts enzymatically to cut the target RNA. Strategic cleavage of such a target RNA will destroy its ability to direct synthesis of an encoded protein. After an enzymatic nucleic acid has bound and cleaved its RNA target, it is released from that RNA to search for another target and can repeatedly bind and cleave new targets.

[1259] The enzymatic nature of a ribozyme is advantageous over many technologies, such as antisense technology (where a nucleic acid molecule simply binds to a nucleic acid target to block its translation) since the concentration of ribozyme necessary to affect a therapeutic treatment is lower than that of an antisense oligonucleotide. This advantage reflects the ability of the ribozyme to act enzymatically. Thus, a single ribozyme molecule is able to cleave many molecules of target RNA. In addition, the ribozyme is a highly specific inhibitor, with the specificity of inhibition depending not only on the base pairing mechanism of binding to the target RNA, but also on the mechanism of target RNA cleavage. Single mismatches, or base-substitutions, near the site of cleavage can completely eliminate catalytic activity of a ribozyme. Similar mismatches in antisense molecules do not prevent their action (Woolf et al., Proc Natl Acad Sci U S A. Aug. 15, 1992;89(16):7305-9). Thus, the specificity of action of a ribozyme is greater than that of an antisense oligonucleotide binding the same RNA site.

[1260] The enzymatic nucleic acid molecule may be formed in a hammerhead, hairpin, a hepatitis δ virus, group I intron or RNaseP RNA (in association with an RNA guide sequence) or Neurospora VS RNA motif. Examples of hammerhead motifs are described by Rossi et al. Nucleic Acids Res. Sep. 11, 1992;20(17):4559-65. Examples of hairpin motifs are described by Hampel et al. (Eur. Pat. Appl. Publ. No. EP 0360257), Hampel and Tritz, Biochemistry Jun. 13, 1989;28(12):4929-33; Hampel et al., Nucleic Acids Res. Jan. 25, 1990;18(2):299-304 and U.S. Pat. No. 5,631,359. An example of the hepatitis δ virus motif is described by Perrotta and Been, Biochemistry. Dec. 1, 1992;31(47):11843-52; an example of the RNaseP motif is described by Guerrier-Takada et al., Cell. December 1983;35(3 Pt 2):849-57; Neurospora VS RNA ribozyme motif is described by Collins (Saville and Collins, Cell. May 18, 1990;61(4):685-96; Saville and Collins, Proc Natl Acad Sci U S A. Oct. 1, 1991;88(19):8826-30; Collins and Olive, Biochemistry. Mar. 23, 1993;32(11):2795-9); and an example of the Group I intron is described in (U.S. Pat. No. 4,987,071). All that is important in an enzymatic nucleic acid molecule of this invention is that it has a specific substrate binding site which is complementary to one or more of the target gene RNA regions, and that it have nucleotide sequences within or surrounding that substrate binding site which impart an RNA cleaving activity to the molecule. Thus the ribozyme constructs need not be limited to specific motifs mentioned herein.

[1261] Ribozymes may be designed as described in Int. Pat. Appl. Publ. No. WO 93/23569 and Int. Pat. Appl. Publ. No. WO 94/02595, each specifically incorporated herein by reference) and synthesized to be tested in vitro and in vivo, as described. Such ribozymes can also be optimized for delivery. While specific examples are provided, those in the art will recognize that equivalent RNA targets in other species can be utilized when necessary.

[1262] Ribozyme activity can be optimized by altering the length of the ribozyme binding arms, or chemically synthesizing ribozymes with modifications that prevent their degradation by serum ribonucleases (see e.g, Int. Pat. Appl. Publ. No. WO 92/07065; Int. Pat. Appl. Publ. No. WO 93/15187; Int. Pat. Appl. Publ. No. WO 91/03162; Eur. Pat. Appl. Publ. No. 92110298.4; U.S. Pat. No. 5,334,711; and Int. Pat. Appl. Publ. No. WO 94/13688, which describe various chemical modifications that can be made to the sugar moieties of enzymatic RNA molecules), modifications which enhance their efficacy in cells, and removal of stem II bases to shorten RNA synthesis times and reduce chemical requirements.

[1263] Sullivan et al. (Int. Pat. Appl. Publ. No. WO 94/02595) describes the general methods for delivery of enzymatic RNA molecules. Ribozymes may be administered to cells by a variety of methods known to those familiar to the art, including, but not restricted to, encapsulation in liposomes, by iontophoresis, or by incorporation into other vehicles, such as hydrogels, cyclodextrins, biodegradable nanocapsules, and bioadhesive microspheres. For some indications, ribozymes may be directly delivered ex vivo to cells or tissues with or without the aforementioned vehicles. Alternatively, the RNA/vehicle combination may be locally delivered by direct inhalation, by direct injection or by use of a catheter, infusion pump or stent. Other routes of delivery include, but are not limited to, intravascular, intramuscular, subcutaneous or joint injection, aerosol inhalation, oral (tablet or pill form), topical, systemic, ocular, intraperitoneal and/or intrathecal delivery. More detailed descriptions of ribozyme delivery and administration are provided in Int. Pat. Appl. Publ. No. WO 94/02595 and Int. Pat. Appl. Publ. No. WO 93/23569, each specifically incorporated herein by reference.

[1264] Another means of accumulating high concentrations of a ribozyme(s) within cells is to incorporate the ribozyme-encoding sequences into a DNA expression vector. Transcription of the ribozyme sequences are driven from a promoter for eukaryotic RNA polymerase I (poi I), RNA polymerase II (pol II), or RNA polymerase III (pol III). Transcripts from pol II or pol III promoters will be expressed at high levels in all cells; the levels of a given pol II promoter in a given cell type will depend on the nature of the gene regulatory sequences (enhancers, silencers, etc.) present nearby. Prokaryotic RNA polymerase promoters may also be used, providing that the prokaryotic RNA polymerase enzyme is expressed in the appropriate cells Ribozymes expressed from such promoters have been shown to function in mammalian cells. Such transcription units can be incorporated into a variety of vectors for introduction into mammalian cells, including but not restricted to, plasmid DNA vectors, viral DNA vectors (such as adenovirus or adeno-associated vectors), or viral RNA vectors (such as retroviral, semliki forest virus, sindbis virus vectors).

[1265] In another embodiment of the invention, peptide nucleic acids (PNAs) compositions are provided. PNA is a DNA mimic in which the nucleobases are attached to a pseudopeptide backbone (Good and Nielsen, Antisense Nucleic Acid Drug Dev. 1997 7(4) 431-37). PNA is able to be utilized in a number methods that traditionally have used RNA or DNA. Often PNA sequences perform better in techniques than the corresponding RNA or DNA sequences and have utilities that are not inherent to RNA or DNA. A review of PNA including methods of making, characteristics of, and methods of using, is provided by Corey (Trends Biotechnol June 1997;15(6):224-9). As such, in certain embodiments, one may prepare PNA sequences that are complementary to one or more portions of the ACE mRNA sequence, and such PNA compositions may be used to regulate, alter, decrease, or reduce the translation of ACE-specific mRNA, and thereby alter the level of ACE activity in a host cell to which such PNA compositions have been administered.

[1266] PNAs have 2-aminoethyl-glycine linkages replacing the normal phosphodiester backbone of DNA (Nielsen et al., Science Dec. 6, 1991;254(5037):1497-500; Hanvey et al., Science. Nov. 27, 1992;258(5087):1481-5; Hyrup and Nielsen, Bioorg Med Chem. January 1996;4(1):5-23). This chemistry has three important consequences: firstly, in contrast to DNA or phosphorothioate oligonucleotides, PNAs are neutral molecules; secondly, PNAs are achiral, which avoids the need to develop a stereoselective synthesis; and thirdly, PNA synthesis uses standard Boc or Fmoc protocols for solid-phase peptide synthesis, although other methods, including a modified Merrifield method, have been used.

[1267] PNA monomers or ready-made oligomers are commercially available from PerSeptive Biosystems (Framingham, Mass.). PNA syntheses by either Boc or Fmoc protocols are straightforward using manual or automated protocols (Norton et al., Bioorg Med Chem. April 1995;3(4):437-45). The manual protocol lends itself to the production of chemically modified PNAs or the simultaneous synthesis of families of closely related PNAs.

[1268] As with peptide synthesis, the success of a particular PNA synthesis will depend on the properties of the chosen sequence. For example, while in theory PNAs can incorporate any combination of nucleotide bases, the presence of adjacent purines can lead to deletions of one or more residues in the product. In expectation of this difficulty, it is suggested that, in producing PNAs with adjacent purines, one should repeat the coupling of residues likely to be added inefficiently. This should be followed by the purification of PNAs by reverse-phase high-pressure liquid chromatography, providing yields and purity of product similar to those observed during the synthesis of peptides.

[1269] Modifications of PNAs for a given application may be accomplished by coupling amino acids during solid-phase synthesis or by attaching compounds that contain a carboxylic acid group to the exposed N-terminal amine. Alternatively, PNAs can be modified after synthesis by coupling to an introduced lysine or cysteine. The ease with which PNAs can be modified facilitates optimization for better solubility or for specific functional requirements. Once synthesized, the identity of PNAs and their derivatives can be confirmed by mass spectrometry. Several studies have made and utilized modifications of PNAs (for example, Norton et al., Bioorg Med Chem. April 1995;3(4):437-45; Petersen et al., J Pept Sci. May-June 1995;1(3):175-83; Orum et al., Biotechniques. September 1995;19(3):472-80; Footer et al., Biochemistry. Aug. 20, 1996;35(33):10673-9; Griffith et al., Nucleic Acids Res. Aug. 11, 1995;23(15):3003-8; Pardridge et al., Proc Natl Acad Sci USA. Jun. 6, 1995;92(12):5592-6; Boffa et al., Proc Natl Acad Sci USA. Mar. 14, 1995;92(6):1901-5; Gambacorti-Passerini et al., Blood. Aug. 15, 1996;88(4):1411-7; Armitage et al., Proc Natl Acad Sci USA. Nov. 11, 1997;94(23):12320-5; Seeger et al., Biotechniques. September 1997;23(3):512-7). U.S. Pat. No. 5,700,922 discusses PNA-DNA-PNA chimeric molecules and their uses in diagnostics, modulating protein in organisms, and treatment of conditions susceptible to therapeutics.

[1270] Methods of characterizing the antisense binding properties of PNAs are discussed in Rose (Anal Chem. Dec. 15, 1993;65(24):3545-9) and Jensen et al. (Biochemistry. Apr. 22, 1997;36(16):5072-7). Rose uses capillary gel electrophoresis to determine binding of PNAs to their complementary oligonucleotide, measuring the relative binding kinetics and stoichiometry. Similar types of measurements were made by Jensen et al. using BIAcore™ technology.

[1271] Other applications of PNAs that have been described and will be apparent to the skilled artisan include use in DNA strand invasion, antisense inhibition, mutational analysis, enhancers of transcription, nucleic acid purification, isolation of transcriptionally active genes, blocking of transcription factor binding, genome cleavage, biosensors, in situ hybridization, and the like.

[1272] Polynucleotide Identification, Characterization and Expression

[1273] Polynucleotides compositions of the present invention may be identified, prepared and/or manipulated using any of a variety of well established techniques (see generally, Sambrook et al., Molecular Cloning: A Laboratory Manual, Cold Spring Harbor Laboratories, Cold Spring Harbor, N.Y., 1989, and other like references). For example, a polynucleotide may be identified, as described in more detail below, by screening a microarray of cDNAs for tumor-associated expression (i.e., expression that is at least two fold greater in a tumor than in normal tissue, as determined using a representative assay provided herein). Such screens may be performed, for example, using the microarray technology of Affymetrix, Inc. (Santa Clara, Calif.) according to the manufacturer's instructions (and essentially as described by Schena et al., Proc. Natl. Acad. Sci. USA 93:10614-10619, 1996 and Heller et al., Proc. Natl. Acad. Sci. USA 94:2150-2155, 1997). Alternatively, polynucleotides may be amplified from cDNA prepared from cells expressing the proteins described herein, such as tumor cells.

[1274] Many template dependent processes are available to amplify a target sequences of interest present in a sample. One of the best known amplification methods is the polymerase chain reaction (PCR™) which is described in detail in U.S. Pat. Nos. 4,683,195, 4,683,202 and 4,800,159, each of which is incorporated herein by reference in its entirety. Briefly, in PCR™, two primer sequences are prepared which are complementary to regions on opposite complementary strands of the target sequence. An excess of deoxynucleoside triphosphates is added to a reaction mixture along with a DNA polymerase (e.g., Taq polymerase). If the target sequence is present in a sample, the primers will bind to the target and the polymerase will cause the primers to be extended along the target sequence by adding on nucleotides. By raising and lowering the temperature of the reaction mixture, the extended primers will dissociate from the target to form reaction products, excess primers will bind to the target and to the reaction product and the process is repeated. Preferably reverse transcription and PCR™ amplification procedure may be performed in order to quantify the amount of mRNA amplified. Polymerase chain reaction methodologies are well known in the art.

[1275] Any of a number of other template dependent processes, many of which are variations of the PCR™ amplification technique, are readily known and available in the art. Illustratively, some such methods include the ligase chain reaction (referred to as LCR), described, for example, in Eur. Pat. Appl. Publ. No. 320,308 and U.S. Pat. No. 4,883,750; Qbeta Replicase, described in PCT Intl. Pat. Appl. Publ. No. PCT/US87/00880; Strand Displacement Amplification (SDA) and Repair Chain Reaction (RCR). Still other amplification methods are described in Great Britain Pat. Appl. No. 2 202 328, and in PCT Intl. Pat. Appl. Publ. No. PCT/US89/01025. Other nucleic acid amplification procedures include transcription-based amplification systems (TAS) (PCT Intl. Pat. Appl. Publ. No. WO 88/10315), including nucleic acid sequence based amplification (NASBA) and 3SR. Eur. Pat. Appl. Publ. No. 329,822 describes a nucleic acid amplification process involving cyclically synthesizing single-stranded RNA (“ssRNA”), ssDNA, and double-stranded DNA (dsDNA). PCT Intl. Pat. Appl. Publ. No. WO 89/06700 describes a nucleic acid sequence amplification scheme based on the hybridization of a promoter/primer sequence to a target single-stranded DNA (“ssDNA”) followed by transcription of many RNA copies of the sequence. Other amplification methods such as “RACE” (Frohman, 1990), and “one-sided PCR” (Ohara, 1989) are also well-known to those of skill in the art.

[1276] An amplified portion of a polynucleotide of the present invention may be used to isolate a full length gene from a suitable library (e.g., a tumor cDNA library) using well known techniques. Within such techniques, a library (cDNA or genomic) is screened using one or more polynucleotide probes or primers suitable for amplification. Preferably, a library is size-selected to include larger molecules. Random primed libraries may also be preferred for identifying 5′ and upstream regions of genes. Genomic libraries are preferred for obtaining introns and extending 5′ sequences.

[1277] For hybridization techniques, a partial sequence may be labeled (e.g., by nick-translation or end-labeling with ³²p) using well known techniques. A bacterial or bacteriophage library is then generally screened by hybridizing filters containing denatured bacterial colonies (or lawns containing phage plaques) with the labeled probe (see Sambrook et al., Molecular Cloning: A Laboratory Manual, Cold Spring Harbor Laboratories, Cold Spring Harbor, NY, 1989). Hybridizing colonies or plaques are selected and expanded, and the DNA is isolated for further analysis. cDNA clones may be analyzed to determine the amount of additional sequence by, for example, PCR using a primer from the partial sequence and a primer from the vector. Restriction maps and partial sequences may be generated to identify one or more overlapping clones. The complete sequence may then be determined using standard techniques, which may involve generating a series of deletion clones. The resulting overlapping sequences can then assembled into a single contiguous sequence. A full length cDNA molecule can be generated by ligating suitable fragments, using well known techniques.

[1278] Alternatively, amplification techniques, such as those described above, can be useful for obtaining a full length coding sequence from a partial cDNA sequence. One such amplification technique is inverse PCR (see Triglia et al., Nucl. Acids Res. 16:8186, 1988), which uses restriction enzymes to generate a fragment in the known region of the gene. The fragment is then circularized by intramolecular ligation and used as a template for PCR with divergent primers derived from the known region. Within an alternative approach, sequences adjacent to a partial sequence may be retrieved by amplification with a primer to a linker sequence and a primer specific to a known region. The amplified sequences are typically subjected to a second round of amplification with the same linker primer and a second primer specific to the known region. A variation on this procedure, which employs two primers that initiate extension in opposite directions from the known sequence, is described in WO 96/38591. Another such technique is known as “rapid amplification of cDNA ends” or RACE. This technique involves the use of an internal primer and an external primer, which hybridizes to a polyA region or vector sequence, to identify sequences that are 5′ and 3′ of a known sequence. Additional techniques include capture PCR (Lagerstrom et al., PCR Methods Applic. 1:111-19, 1991) and walking PCR (Parker et al., Nucl. Acids. Res. 19:3055-60, 1991). Other methods employing amplification may also be employed to obtain a full length cDNA sequence.

[1279] In certain instances, it is possible to obtain a full length cDNA sequence by analysis of sequences provided in an expressed sequence tag (EST) database, such as that available from GenBank. Searches for overlapping ESTs may generally be performed using well known programs (e.g., NCBI BLAST searches), and such ESTs may be used to generate a contiguous full length sequence. Full length DNA sequences may also be obtained by analysis of genomic fragments.

[1280] In other embodiments of the invention, polynucleotide sequences or fragments thereof which encode polypeptides of the invention, or fusion proteins or functional equivalents thereof, may be used in recombinant DNA molecules to direct expression of a polypeptide in appropriate host cells. Due to the inherent degeneracy of the genetic code, other DNA sequences that encode substantially the same or a functionally equivalent amino acid sequence may be produced and these sequences may be used to clone and express a given polypeptide.

[1281] As will be understood by those of skill in the art, it may be advantageous in some instances to produce polypeptide-encoding nucleotide sequences possessing non-naturally occurring codons. For example, codons preferred by a particular prokaryotic or eukaryotic host can be selected to increase the rate of protein expression or to produce a recombinant RNA transcript having desirable properties, such as a half-life which is longer than that of a transcript generated from the naturally occurring sequence.

[1282] Moreover, the polynucleotide sequences of the present invention can be engineered using methods generally known in the art in order to alter polypeptide encoding sequences for a variety of reasons, including but not limited to, alterations which modify the cloning, processing, and/or expression of the gene product. For example, DNA shuffling by random fragmentation and PCR reassembly of gene fragments and synthetic oligonucleotides may be used to engineer the nucleotide sequences. In addition, site-directed mutagenesis may be used to insert new restriction sites, alter glycosylation patterns, change codon preference, produce splice variants, or introduce mutations, and so forth.

[1283] In another embodiment of the invention, natural, modified, or recombinant nucleic acid sequences may be ligated to a heterologous sequence to encode a fusion protein. For example, to screen peptide libraries for inhibitors of polypeptide activity, it may be useful to encode a chimeric protein that can be recognized by a commercially available antibody. A fusion protein may also be engineered to contain a cleavage site located between the polypeptide-encoding sequence and the heterologous protein sequence, so that the polypeptide may be cleaved and purified away from the heterologous moiety.

[1284] Sequences encoding a desired polypeptide may be synthesized, in whole or in part, using chemical methods well known in the art (see Caruthers, M. H. et al. (1980) Nucl. Acids Res. Symp. Ser. 215-223, Horn, T. et al. (1980) Nucl. Acids Res. Symp. Ser. 225-232). Alternatively, the protein itself may be produced using chemical methods to synthesize the amino acid sequence of a polypeptide, or a portion thereof. For example, peptide synthesis can be performed using various solid-phase techniques (Roberge, J. Y. et al. (1995) Science 269:202-204) and automated synthesis may be achieved, for example, using the ABI 431A Peptide Synthesizer (Perkin Elmer, Palo Alto, Calif.).

[1285] A newly synthesized peptide may be substantially purified by preparative high performance liquid chromatography (e.g., Creighton, T. (1983) Proteins, Structures and Molecular Principles, WH Freeman and Co., New York, N.Y.) or other comparable techniques available in the art. The composition of the synthetic peptides may be confirmed by amino acid analysis or sequencing (e.g., the Edman degradation procedure). Additionally, the amino acid sequence of a polypeptide, or any part thereof, may be altered during direct synthesis and/or combined using chemical methods with sequences from other proteins, or any part thereof, to produce a variant polypeptide.

[1286] In order to express a desired polypeptide, the nucleotide sequences encoding the polypeptide, or functional equivalents, may be inserted into appropriate expression vector, i.e., a vector which contains the necessary elements for the transcription and translation of the inserted coding sequence. Methods which are well known to those skilled in the art may be used to construct expression vectors containing sequences encoding a polypeptide of interest and appropriate transcriptional and translational control elements. These methods include in vitro recombinant DNA techniques, synthetic techniques, and in vivo genetic recombination. Such techniques are described, for example, in Sambrook, J. et al. (1989) Molecular Cloning, A Laboratory Manual, Cold Spring Harbor Press, Plainview, N.Y., and Ausubel, F. M. et al. (1989) Current Protocols in Molecular Biology, John Wiley & Sons, New York. N.Y.

[1287] A variety of expression vector/host systems may be utilized to contain and express polynucleotide sequences. These include, but are not limited to, microorganisms such as bacteria transformed with recombinant bacteriophage, plasmid, or cosmid DNA expression vectors; yeast transformed with yeast expression vectors; insect cell systems infected with virus expression vectors (e.g., baculovirus); plant cell systems transformed with virus expression vectors (e.g., cauliflower mosaic virus, CaMV; tobacco mosaic virus, TMV) or with bacterial expression vectors (e.g., Ti or pBR322 plasmids); or animal cell systems.

[1288] The “control elements” or “regulatory sequences” present in an expression vector are those non-translated regions of the vector-enhancers, promoters, 5′ and 3′ untranslated regions—which interact with host cellular proteins to carry out transcription and translation. Such elements may vary in their strength and specificity. Depending on the vector system and host utilized, any number of suitable transcription and translation elements, including constitutive and inducible promoters, may be used. For example, when cloning in bacterial systems, inducible promoters such as the hybrid lacZ promoter of the pBLUESCRIPT phagemid (Stratagene, La Jolla, Calif.) or pSPORT1 plasmid (Gibco BRL, Gaithersburg, Md.) and the like may be used. In mammalian cell systems, promoters from mammalian genes or from mammalian viruses are generally preferred. If it is necessary to generate a cell line that contains multiple copies of the sequence encoding a polypeptide, vectors based on SV40 or EBV may be advantageously used with an appropriate selectable marker.

[1289] In bacterial systems, any of a number of expression vectors may be selected depending upon the use intended for the expressed polypeptide. For example, when large quantities are needed, for example for the induction of antibodies, vectors which direct high level expression of fusion proteins that are readily purified may be used. Such vectors include, but are not limited to, the multifunctional E. coli cloning and expression vectors such as pBLUESCRIPT (Stratagene), in which the sequence encoding the polypeptide of interest may be ligated into the vector in frame with sequences for the amino-terminal Met and the subsequent 7 residues of beta.-galactosidase so that a hybrid protein is produced; pIN vectors (Van Heeke, G. and S. M. Schuster (1989) J. Biol. Chem. 264:5503-5509); and the like. pGEX Vectors (Promega, Madison, Wis.) may also be used to express foreign polypeptides as fusion proteins with glutathione S-transferase (GST). In general, such fusion proteins are soluble and can easily be purified from lysed cells by adsorption to glutathione-agarose beads followed by elution in the presence of free glutathione. Proteins made in such systems may be designed to include heparin, thrombin, or factor XA protease cleavage sites so that the cloned polypeptide of interest can be released from the GST moiety at will.

[1290] In the yeast, Saccharomyces cerevisiae, a number of vectors containing constitutive or inducible promoters such as alpha factor, alcohol oxidase, and PGH may be used. For reviews, see Ausubel et al. (supra) and Grant et al. (1987) Methods Enzymol. 153:516-544.

[1291] In cases where plant expression vectors are used, the expression of sequences encoding polypeptides may be driven by any of a number of promoters. For example, viral promoters such as the 35S and 19S promoters of CaMV may be used alone or in combination with the omega leader sequence from TMV (Takamatsu, N. (1987) EMBO J. 6:307-31 1. Alternatively, plant promoters such as the small subunit of RUBISCO or heat shock promoters may be used (Coruzzi, G. et al. (1984) EMBO J. 3:1671-1680; Broglie, R. et al. (1984) Science 224:838-843; and Winter, J. et al. (1991) Results Probl. Cell Differ. 17:85-105). These constructs can be introduced into plant cells by direct DNA transformation or pathogen-mediated transfection. Such techniques are described in a number of generally available reviews (see, for example, Hobbs, S. or Murry, L. E. in McGraw Hill Yearbook of Science and Technology (1992) McGraw Hill, New York, N.Y.; pp. 191-196).

[1292] An insect system may also be used to express a polypeptide of interest. For example, in one such system, Autographa californica nuclear polyhedrosis virus (AcNPV) is used as a vector to express foreign genes in Spodoptera frugiperda cells or in Trichoplusia larvae. The sequences encoding the polypeptide may be cloned into a non-essential region of the virus, such as the polyhedrin gene, and placed under control of the polyhedrin promoter. Successful insertion of the polypeptide-encoding sequence will render the polyhedrin gene inactive and produce recombinant virus lacking coat protein. The recombinant viruses may then be used to infect, for example, S. frugiperda cells or Trichoplusia larvae in which the polypeptide of interest may be expressed (Engelhard, E. K. et al. (1994) Proc. Natl. Acad. Sci. 91 :3224-3227).

[1293] In mammalian host cells, a number of viral-based expression systems are generally available. For example, in cases where an adenovirus is used as an expression vector, sequences encoding a polypeptide of interest may be ligated into an adenovirus transcription/translation complex consisting of the late promoter and tripartite leader sequence. Insertion in a non-essential E1 or E3 region of the viral genome may be used to obtain a viable virus which is capable of expressing the polypeptide in infected host cells (Logan, J. and Shenk, T. (1984) Proc. Natl. Acad. Sci. 81:3655-3659). In addition, transcription enhancers, such as the Rous sarcoma virus (RSV) enhancer, may be used to increase expression in mammalian host cells.

[1294] Specific initiation signals may also be used to achieve more efficient translation of sequences encoding a polypeptide of interest. Such signals include the ATG initiation codon and adjacent sequences. In cases where sequences encoding the polypeptide, its initiation codon, and upstream sequences are inserted into the appropriate expression vector, no additional transcriptional or translational control signals may be needed. However, in cases where only coding sequence, or a portion thereof, is inserted, exogenous translational control signals including the ATG initiation codon should be provided. Furthermore, the initiation codon should be in the correct reading frame to ensure translation of the entire insert. Exogenous translational elements and initiation codons may be of various origins, both natural and synthetic. The efficiency of expression may be enhanced by the inclusion of enhancers which are appropriate for the particular cell system which is used, such as those described in the literature (Scharf, D. et al. (1994) Results Probl. Cell Differ. 20:125-162).

[1295] In addition, a host cell strain may be chosen for its ability to modulate the expression of the inserted sequences or to process the expressed protein in the desired fashion. Such modifications of the polypeptide include, but are not limited to, acetylation, carboxylation. glycosylation, phosphorylation, lipidation, and acylation. Post-translational processing which cleaves a “prepro” form of the protein may also be used to facilitate correct insertion, folding and/or function. Different host cells such as CHO, COS, HeLa, MDCK, HEK293, and WI38, which have specific cellular machinery and characteristic mechanisms for such post-translational activities, may be chosen to ensure the correct modification and processing of the foreign protein.

[1296] For long-term, high-yield production of recombinant proteins, stable expression is generally preferred. For example, cell lines which stably express a polynucleotide of interest may be transformed using expression vectors which may contain viral origins of replication and/or endogenous expression elements and a selectable marker gene on the same or on a separate vector. Following the introduction of the vector, cells may be allowed to grow for 1-2 days in an enriched media before they are switched to selective media. The purpose of the selectable marker is to confer resistance to selection, and its presence allows growth and recovery of cells which successfully express the introduced sequences. Resistant clones of stably transformed cells may be proliferated using tissue culture techniques appropriate to the cell type.

[1297] Any number of selection systems may be used to recover transformed cell lines. These include, but are not limited to, the herpes simplex virus thymidine kinase (Wigler, M. et al. (1977) Cell 11:223-32) and adenine phosphoribosyltransferase (Lowy, I. et al. (1990) Cell 22:817-23) genes which can be employed in tk.sup.- or aprt.sup.- cells, respectively. Also, antimetabolite, antibiotic or herbicide resistance can be used as the basis for selection; for example, dhfr which confers resistance to methotrexate (Wigler, M. et al. (1980) Proc. Natl. Acad. Sci. 77:3567-70); npt, which confers resistance to the aminoglycosides, neomycin and G-418 (Colbere-Garapin, F. et al (1981) J. Mol. Biol. 150:1-14); and als or pat, which confer resistance to chlorsulfuron and phosphinotricin acetyltransferase, respectively (Murry, supra). Additional selectable genes have been described, for example, trpB, which allows cells to utilize indole in place of tryptophan, or hisD, which allows cells to utilize histinol in place of histidine (Hartman, S. C. and R. C. Mulligan (1988) Proc. Natl. Acad. Sci. 85:8047-51). The use of visible markers has gained popularity with such markers as anthocyanins, beta-glucuronidase and its substrate GUS, and luciferase and its substrate luciferin, being widely used not only to identify transformants, but also to quantify the amount of transient or stable protein expression attributable to a specific vector system (Rhodes, C. A. et al. (1995) Methods Mol. Biol. 55:121-131).

[1298] Although the presence/absence of marker gene expression suggests that the gene of interest is also present, its presence and expression may need to be confirmed. For example, if the sequence encoding a polypeptide is inserted within a marker gene sequence, recombinant cells containing sequences can be identified by the absence of marker gene function. Alternatively, a marker gene can be placed in tandem with a polypeptide-encoding sequence under the control of a single promoter. Expression of the marker gene in response to induction or selection usually indicates expression of the tandem gene as well.

[1299] Alternatively, host cells that contain and express a desired polynucleotide sequence may be identified by a variety of procedures known to those of skill in the art. These procedures include, but are not limited to, DNA-DNA or DNA-RNA hybridizations and protein bioassay or immunoassay techniques which include, for example, membrane, solution, or chip based technologies for the detection and/or quantification of nucleic acid or protein.

[1300] A variety of protocols for detecting and measuring the expression of polynucleotide-encoded products, using either polyclonal or monoclonal antibodies specific for the product are known in the art. Examples include enzyme-linked immunosorbent assay (ELISA), radioimmunoassay (RIA), and fluorescence activated cell sorting (FACS). A two-site, monoclonal-based immunoassay utilizing monoclonal antibodies reactive to two non-interfering epitopes on a given polypeptide may be preferred for some applications, but a competitive binding assay may also be employed. These and other assays are described, among other places, in Hampton, R. et al. (1990; Serological Methods, a Laboratory Manual, APS Press, St Paul. Minn.) and Maddox, D. E. et al. (1983; J. Exp. Med. 158:1211-1216).

[1301] A wide variety of labels and conjugation techniques are known by those skilled in the art and may be used in various nucleic acid and amino acid assays. Means for producing labeled hybridization or PCR probes for detecting sequences related to polynucleotides include oligolabeling, nick translation, end-labeling or PCR amplification using a labeled nucleotide. Alternatively, the sequences, or any portions thereof may be cloned into a vector for the production of an mRNA probe. Such vectors are known in the art, are commercially available, and may be used to synthesize RNA probes in vitro by addition of an appropriate RNA polymerase such as T7, T3, or SP6 and labeled nucleotides. These procedures may be conducted using a variety of commercially available kits. Suitable reporter molecules or labels, which may be used include radionuclides, enzymes, fluorescent, chemiluminescent, or chromogenic agents as well as substrates, cofactors, inhibitors, magnetic particles, and the like.

[1302] Host cells transformed with a polynucleotide sequence of interest may be cultured under conditions suitable for the expression and recovery of the protein from cell culture. The protein produced by a recombinant cell may be secreted or contained intracellularly depending on the sequence and/or the vector used. As will be understood by those of skill in the art, expression vectors containing polynucleotides of the invention may be designed to contain signal sequences which direct secretion of the encoded polypeptide through a prokaryotic or eukaryotic cell membrane. Other recombinant constructions may be used to join sequences encoding a polypeptide of interest to nucleotide sequence encoding a polypeptide domain which will facilitate purification of soluble proteins. Such purification facilitating domains include, but are not limited to, metal chelating peptides such as histidine-tryptophan modules that allow purification on immobilized metals, protein A domains that allow purification on immobilized immunoglobulin, and the domain utilized in the FLAGS extension/affinity purification system (Immunex Corp., Seattle, Wash.). The inclusion of cleavable linker sequences such as those specific for Factor XA or enterokinase (Invitrogen. San Diego, Calif.) between the purification domain and the encoded polypeptide may be used to facilitate purification. One such expression vector provides for expression of a fusion protein containing a polypeptide of interest and a nucleic acid encoding 6 histidine residues preceding a thioredoxin or an enterokinase cleavage site. The histidine residues facilitate purification on IMIAC (immobilized metal ion affinity chromatography) as described in Porath, J. et al. (1992, Prot. Exp. Purif. 3:263-281) while the enterokinase cleavage site provides a means for purifying the desired polypeptide from the fusion protein. A discussion of vectors which contain fusion proteins is provided in Kroll, D. J. et al. (1993; DNA Cell Biol. 12:441-453).

[1303] In addition to recombinant production methods, polypeptides of the invention, and fragments thereof, may be produced by direct peptide synthesis using solid-phase techniques (Merrifield J. (1963) J. Am. Chem. Soc. 85:2149-2154). Protein synthesis may be performed using manual techniques or by automation. Automated synthesis may be achieved, for example, using Applied Biosystems 431A Peptide Synthesizer (Perkin Elmer). Alternatively, various fragments may be chemically synthesized separately and combined using chemical methods to produce the full length molecule.

[1304] Antibody Compositions, Fragments Thereof and Other Binding Agents

[1305] According to another aspect, the present invention further provides binding agents, such as antibodies and antigen-binding fragments thereof, that exhibit immunological binding to a tumor polypeptide disclosed herein, or to a portion, variant or derivative thereof. An antibody, or antigen-binding fragment thereof, is said to “specifically bind,” “immunogically bind,” and/or is “immunologically reactive” to a polypeptide of the invention if it reacts at a detectable level (within, for example, an ELISA assay) with the polypeptide, and does not react detectably with unrelated polypeptides under similar conditions.

[1306] Immunological binding, as used in this context, generally refers to the non-covalent interactions of the type which occur between an immunoglobulin molecule and an antigen for which the immunoglobulin is specific. The strength, or affinity of immunological binding interactions can be expressed in terms of the dissociation constant (K_{d}) of the interaction, wherein a smaller K_{d} represents a greater affinity. Immunological binding properties of selected polypeptides can be quantified using methods well known in the art. One such method entails measuring the rates of antigen-binding site/antigen complex formation and dissociation, wherein those rates depend on the concentrations of the complex partners, the affinity of the interaction, and on geometric parameters that equally influence the rate in both directions. Thus, both the “on rate constant” (Kₒₙ) and the “loff rate constant” (K_{off}) can be determined by calculation of the concentrations and the actual rates of association and dissociation. The ratio of K_{off}/Kₒₙ enables cancellation of all parameters not related to affinity, and is thus equal to the dissociation constant K_{d}. See, generally, Davies et al. (1990) Annual Rev. Biochem. 59:439-473.

[1307] An “antigen-binding site,” or “binding portion” of an antibody refers to the part of the immunoglobulin molecule that participates in antigen binding. The antigen binding site is formed by amino acid residues of the N-terminal variable (“V”) regions of the heavy (“H”) and light (“L”) chains. Three highly divergent stretches within the V regions of the heavy and light chains are referred to as “hypervariable regions” which are interposed between more conserved flanking stretches known as “framework regions,” or “FRs”. Thus the term “FR” refers to amino acid sequences which are naturally found between and adjacent to hypervariable regions in immunoglobulins. In an antibody molecule, the three hypervariable regions of a light chain and the three hypervariable regions of a heavy chain are disposed relative to each other in three dimensional space to form an antigen-binding surface. The antigen-binding surface is complementary to the three-dimensional surface of a bound antigen, and the three hypervariable regions of each of the heavy and light chains are referred to as “complementarity-determining regions,” or “CDRs.”

[1308] Binding agents may be further capable of differentiating between patients with and without a cancer, such as colon cancer, using the representative assays provided herein. For example, antibodies or other binding agents that bind to a tumor protein will preferably generate a signal indicating the presence of a cancer in at least about 20% of patients with the disease, more preferably at least about 30% of patients. Alternatively, or in addition, the antibody will generate a negative signal indicating the absence of the disease in at least about 90% of individuals without the cancer. To determine whether a binding agent satisfies this requirement, biological samples (e.g., blood, sera, sputum, urine and/or tumor biopsies) from patients with and without a cancer (as determined using standard clinical tests) may be assayed as described herein for the presence of polypeptides that bind to the binding agent. Preferably, a statistically significant number of samples with and without the disease will be assayed. Each binding agent should satisfy the above criteria; however, those of ordinary skill in the art will recognize that binding agents may be used in combination to improve sensitivity.

[1309] Any agent that satisfies the above requirements may be a binding agent. For example, a binding agent may be a ribosome, with or without a peptide component, an RNA molecule or a polypeptide. In a preferred embodiment, a binding agent is an antibody or an antigen-binding fragment thereof. Antibodies may be prepared by any of a variety of techniques known to those of ordinary skill in the art. See, e.g., Harlow and Lane, Antibodies: A Laboratory Manual, Cold Spring Harbor Laboratory, 1988. In general, antibodies can be produced by cell culture techniques, including the generation of monoclonal antibodies as described herein, or via transfection of antibody genes into suitable bacterial or mammalian cell hosts, in order to allow for the production of recombinant antibodies. In one technique, an immunogen comprising the polypeptide is initially injected into any of a wide variety of mammals (e.g., mice, rats, rabbits, sheep or goats). In this step, the polypeptides of this invention may serve as the immunogen without modification. Alternatively, particularly for relatively short polypeptides, a superior immune response may be elicited if the polypeptide is joined to a carrier protein, such as bovine serum albumin or keyhole limpet hemocyanin. The immunogen is injected into the animal host, preferably according to a predetermined schedule incorporating one or more booster immunizations, and the animals are bled periodically. Polyclonal antibodies specific for the polypeptide may then be purified from such antisera by, for example, affinity chromatography using the polypeptide coupled to a suitable solid support. Monoclonal antibodies specific for an antigenic polypeptide of interest may be prepared, for example, using the technique of Kohler and Milstein, Eur. J. Immunol. 6:511-519, 1976, and improvements thereto. Briefly, these methods involve the preparation of immortal cell lines capable of producing antibodies having the desired specificity (i.e., reactivity with the polypeptide of interest). Such cell lines may be produced, for example, from spleen cells obtained from an animal immunized as described above. The spleen cells are then immortalized by, for example, fusion with a myeloma cell fusion partner, preferably one that is syngeneic with the immunized animal. A variety of fusion techniques may be employed. For example, the spleen cells and myeloma cells may be combined with a nonionic detergent for a few minutes and then plated at low density on a selective medium that supports the growth of hybrid cells, but not myeloma cells. A preferred selection technique uses HAT (hypoxanthine, aminopterin, thymidine) selection. After a sufficient time, usually about 1 to 2 weeks, colonies of hybrids are observed. Single colonies are selected and their culture supernatants tested for binding activity against the polypeptide. Hybridomas having high reactivity and specificity are preferred.

[1310] Monoclonal antibodies may be isolated from the supernatants of growing hybridoma colonies. In addition, various techniques may be employed to enhance the yield, such as injection of the hybridoma cell line into the peritoneal cavity of a suitable vertebrate host, such as a mouse. Monoclonal antibodies may then be harvested from the ascites fluid or the blood. Contaminants may be removed from the antibodies by conventional techniques, such as chromatography, gel filtration, precipitation, and extraction. The polypeptides of this invention may be used in the purification process in, for example, an affinity chromatography step.

[1311] A number of therapeutically useful molecules are known in the art which comprise antigen-binding sites that are capable of exhibiting immunological binding properties of an antibody molecule. The proteolytic enzyme papain preferentially cleaves IgG molecules to yield several fragments, two of which (the “F(ab)” fragments) each comprise a covalent heterodimer that includes an intact antigen-binding site. The enzyme pepsin is able to cleave IgG molecules to provide several fragments, including the “F(ab′)₂ ” fragment which comprises both antigen-binding sites. An “Fv” fragment can be produced by preferential proteolytic cleavage of an IgM, and on rare occasions IgG or IgA immunoglobulin molecule. Fv fragments are, however, more commonly derived using recombinant techniques known in the art. The Fv fragment includes a non-covalent V_{H}::V_{L} heterodimer including an antigen-binding site which retains much of the antigen recognition and binding capabilities of the native antibody molecule. Inbar et al. (1972) Proc. Nat. Acad. Sci. USA 69:2659-2662; Hochman et al. (1976) Biochem 15:2706-2710; and Ehrlich et al. (1980) Biochem 19:4091-4096.

[1312] A single chain Fv (“sFv”) polypeptide is a covalently linked V_{H}::V_{L} heterodimer which is expressed from a gene fusion including V_{H}- and V_{L}-encoding genes linked by a peptide-encoding linker. Huston et al. (1988) Proc. Nat. Acad. Sci. USA 85(16):5879-5883. A number of methods have been described to discern chemical structures for converting the naturally aggregated—but chemically separated—light and heavy polypeptide chains from an antibody V region into an sFv molecule which will fold into a three dimensional structure substantially similar to the structure of an antigen-binding site. See, e.g., U.S. Pat. Nos. 5,091,513 and 5,132,405, to Huston et al.; and U.S. Pat. No. 4,946,778, to Ladner et al.

[1313] Each of the above-described molecules includes a heavy chain and a light chain CDR set, respectively interposed between a heavy chain and a light chain FR set which provide support to the CDRS and define the spatial relationship of the CDRs relative to each other. As used herein, the term “CDR set” refers to the three hypervariable regions of a heavy or light chain V region. Proceeding from the N-terminus of a heavy or light chain, these regions are denoted as “CDR1,” “CDR2,” and “CDR3” respectively. An antigen-binding site, therefore, includes six CDRs, comprising the CDR set from each of a heavy and a light chain V region. A polypeptide comprising a single CDR, (e.g., a CDR1, CDR2 or CDR3) is referred to herein as a “molecular recognition unit.” Crystallographic analysis of a number of antigen-antibody complexes has demonstrated that the amino acid residues of CDRs form extensive contact with bound antigen, wherein the most extensive antigen contact is with the heavy chain CDR3. Thus, the molecular recognition units are primarily responsible for the specificity of an antigen-binding site.

[1314] As used herein, the term “FR set” refers to the four flanking amino acid sequences which frame the CDRs of a CDR set of a heavy or light chain V region. Some FR residues may contact bound antigen; however, FRs are primarily responsible for folding the V region into the antigen-binding site, particularly the FR residues directly adjacent to the CDRS. Within FRs, certain amino residues and certain structural features are very highly conserved. In this regard, all V region sequences contain an internal disulfide loop of around 90 amino acid residues. When the V regions fold into a binding-site, the CDRs are displayed as projecting loop motifs which form an antigen-binding surface. It is generally recognized that there are conserved structural regions of FRs which influence the folded shape of the CDR loops into certain “canonical” structures—regardless of the precise CDR amino acid sequence. Further, certain FR residues are known to participate in non-covalent interdomain contacts which stabilize the interaction of the antibody heavy and light chains.

[1315] A number of “humanized” antibody molecules comprising an antigen-binding site derived from a non-human immunoglobulin have been described, including chimeric antibodies having rodent V regions and their associated CDRs fused to human constant domains (Winter et al. (1991) Nature 349:293-299; Lobuglio et al. (1989) Proc. Nat. Acad. Sci. USA 86:4220-4224; Shaw et al. (1987) J Immunol. 138:4534-4538; and Brown et al. (1987) Cancer Res. 47:3577-3583), rodent CDRs grafted into a human supporting FR prior to fusion with an appropriate human antibody constant domain (Riechmann et al. (1988) Nature 332:323-327; Verhoeyen et al. (1988) Science 239:1534-1536; and Jones et al. (1986) Nature 321:522-525), and rodent CDRs supported by recombinantly veneered rodent FRs (European Patent Publication No. 519,596, published Dec. 23, 1992). These “humanized” molecules are designed to minimize unwanted immunological response toward rodent antihuman antibody molecules which limits the duration and effectiveness of therapeutic applications of those moieties in human recipients.

[1316] As used herein, the terms “veneered FRs” and “recombinantly veneered FRs” refer to the selective replacement of FR residues from, e.g., a rodent heavy or light chain V region, with human FR residues in order to provide a xenogeneic molecule comprising an antigen-binding site which retains substantially all of the native FR polypeptide folding structure. Veneering techniques are based on the understanding that the ligand binding characteristics of an antigen-binding site are determined primarily by the structure and relative disposition of the heavy and light chain CDR sets within the antigen-binding surface. Davies et al. (1990) Ann. Rev. Biochem. 59:439-473. Thus, antigen binding specificity can be preserved in a humanized antibody only wherein the CDR structures, their interaction with each other, and their interaction with the rest of the V region domains are carefully maintained. By using veneering techniques, exterior (e.g., solvent-accessible) FR residues which are readily encountered by the immune system are selectively replaced with human residues to provide a hybrid molecule that comprises either a weakly immunogenic, or substantially non-immunogenic veneered surface.

[1317] The process of veneering makes use of the available sequence data for human antibody variable domains compiled by Kabat et al., in Sequences of Proteins of Immunological Interest, 4th ed., (U.S. Dept. of Health and Human Services, U.S. Government Printing Office, 1987), updates to the Kabat database, and other accessible U.S. and foreign databases (both nucleic acid and protein). Solvent accessibilities of V region amino acids can be deduced from the known three-dimensional structure for human and murine antibody fragments. There are two general steps in veneering a murine antigen-binding site. Initially, the FRs of the variable domains of an antibody molecule of interest are compared with corresponding FR sequences of human variable domains obtained from the above-identified sources. The most homologous human V regions are then compared residue by residue to corresponding murine amino acids. The residues in the murine FR which differ from the human counterpart are replaced by the residues present in the human moiety using recombinant techniques well known in the art. Residue switching is only carried out with moieties which are at least partially exposed (solvent accessible), and care is exercised in the replacement of amino acid residues which may have a significant effect on the tertiary structure of V region domains, such as proline, glycine and charged amino acids.

[1318] In this manner, the resultant “veneered” murine antigen-binding sites are thus designed to retain the murine CDR residues, the residues substantially adjacent to the CDRs, the residues identified as buried or mostly buried (solvent inaccessible), the residues believed to participate in non-covalent (e.g., electrostatic and hydrophobic) contacts between heavy and light chain domains, and the residues from conserved structural regions of the FRs which are believed to influence the “canonical” tertiary structures of the CDR loops. These design criteria are then used to prepare recombinant nucleotide sequences which combine the CDRs of both the heavy and light chain of a murine antigen-binding site into human-appearing FRs that can be used to transfect mammalian cells for the expression of recombinant human antibodies which exhibit the antigen specificity of the murine antibody molecule.

[1319] In another embodiment of the invention, monoclonal antibodies of the present invention may be coupled to one or more therapeutic agents. Suitable agents in this regard include radionuclides, differentiation inducers, drugs, toxins, and derivatives thereof. Preferred radionuclides include ⁹⁰Y, ¹²³I, ¹²⁵I, ¹³¹I, ¹⁸⁶Re, ¹⁸⁸Re, ²¹¹At, and ²¹²Bi. Preferred drugs include methotrexate, and pyrimidine and purine analogs. Preferred differentiation inducers include phorbol esters and butyric acid. Preferred toxins include ricin, abrin, diptheria toxin, cholera toxin, gelonin, Pseudomonas exotoxin, Shigella toxin, and pokeweed antiviral protein.

[1320] A therapeutic agent may be coupled (e.g., covalently bonded) to a suitable monoclonal antibody either directly or indirectly (e.g., via a linker group). A direct reaction between an agent and an antibody is possible when each possesses a substituent capable of reacting with the other. For example, a nucleophilic group, such as an amino or sulfhydryl group, on one may be capable of reacting with a carbonyl-containing group, such as an anhydride or an acid halide, or with an alkyl group containing a good leaving group (e.g., a halide) on the other.

[1321] Alternatively, it may be desirable to couple a therapeutic agent and an antibody via a linker group. A linker group can function as a spacer to distance an antibody from an agent in order to avoid interference with binding capabilities. A linker group can also serve to increase the chemical reactivity of a subtituent on an agent or an antibody, and thus increase the coupling efficiency. An increase in chemical reactivity may also facilitate the use of agents, or functional groups on agents, which otherwise would not be possible.

[1322] It will be evident to those skilled in the art that a variety of bifunctional or polyfunctional reagents, both homo- and hetero-functional (such as those described in the catalog of the Pierce Chemical Co., Rockford, Ill.), may be employed as the linker group. Coupling may be affected, for example, through amino groups, carboxyl groups, sulfhydryl groups or oxidized carbohydrate residues. There are numerous references describing such methodology, e.g., U.S. Pat. No. 4,671,958, to Rodwell et al.

[1323] Where a therapeutic agent is more potent when free from the antibody portion of the immunoconjugates of the present invention, it may be desirable to use a linker group which is cleavable during or upon internalization into a cell. A number of different cleavable linker groups have been described. The mechanisms for the intracellular release of an agent from these linker groups include cleavage by reduction of a disulfide bond (e.g., U.S. Pat. No. 4,489,710, to Spitler), by irradiation of a photolabile bond (e.g., U.S. Pat. No. 4,625,014, to Senter et al.), by hydrolysis of derivatized amino acid side chains (e.g., U.S. Pat. No. 4,638,045, to Kohn et al.), by serum complement-mediated hydrolysis (e.g., U.S. Pat. No. 4,671,958, to Rodwell et al.), and acid-catalyzed hydrolysis (e.g., U.S. Pat. No. 4,569,789, to Blattler et al.).

[1324] It may be desirable to couple more than one agent to an antibody. In one embodiment, multiple molecules of an agent are coupled to one antibody molecule. In another embodiment, more than one type of agent may be coupled to one antibody. Regardless of the particular embodiment, immunoconjugates with more than one agent may be prepared in a variety of ways. For example, more than one agent may be coupled directly to an antibody molecule, or linkers that provide multiple sites for attachment can be used. Alternatively, a carrier can be used.

[1325] A carrier may bear the agents in a variety of ways, including covalent bonding either directly or via a linker group. Suitable carriers include proteins such as albumins (e.g., U.S. Pat. No. 4,507,234, to Kato et al.), peptides and polysaccharides such as aminodextran (e.g., U.S. Pat. No. 4,699,784, to Shih et al.). A carrier may also bear an agent by noncovalent bonding or by encapsulation, such as within a liposome vesicle (e.g., U.S. Pat. Nos. 4,429,008 and 4,873,088). Carriers specific for radionuclide agents include radiohalogenated small molecules and chelating compounds. For example, U.S. Pat. No. 4,735,792 discloses representative radiohalogenated small molecules and their synthesis. A radionuclide chelate may be formed from chelating compounds that include those containing nitrogen and sulfur atoms as the donor atoms for binding the metal, or metal oxide, radionuclide. For example, U.S. Pat. No. 4,673,562, to Davison et al. discloses representative chelating compounds and their synthesis.

[1326] T Cell Compositions

[1327] The present invention, in another aspect, provides T cells specific for a tumor polypeptide disclosed herein, or for a variant or derivative thereof. Such cells may generally be prepared in vitro or ex vivo, using standard procedures. For example, T cells may be isolated from bone marrow, peripheral blood, or a fraction of bone marrow or peripheral blood of a patient, using a commercially available cell separation system, such as the Isolex™ System, available from Nexell Therapeutics, Inc. (Irvine, Calif.; see also U.S. Pat. No. 5,240,856; U.S. Pat. No. 5,215,926; WO 89/06280; WO 91/16116 and WO 92/07243). Alternatively, T cells may be derived from related or unrelated humans, non-human mammals, cell lines or cultures.

[1328] T cells may be stimulated with a polypeptide, polynucleotide encoding a polypeptide and/or an antigen presenting cell (APC) that expresses such a polypeptide. Such stimulation is performed under conditions and for a time sufficient to permit the generation of T cells that are specific for the polypeptide of interest. Preferably, a tumor polypeptide or polynucleotide of the invention is present within a delivery vehicle, such as a microsphere, to facilitate the generation of specific T cells.

[1329] T cells are considered to be specific for a polypeptide of the present invention if the T cells specifically proliferate, secrete cytokines or kill target cells coated with the polypeptide or expressing a gene encoding the polypeptide. T cell specificity may be evaluated using any of a variety of standard techniques. For example, within a chromium release assay or proliferation assay, a stimulation index of more than two fold increase in lysis and/or proliferation, compared to negative controls, indicates T cell specificity. Such assays may be performed, for example, as described in Chen et al., Cancer Res. 54:1065-1070, 1994. Alternatively, detection of the proliferation of T cells may be accomplished by a variety of known techniques. For example, T cell proliferation can be detected by measuring an increased rate of DNA synthesis (e.g., by pulse-labeling cultures of T cells with tritiated thymidine and measuring the amount of tritiated thymidine incorporated into DNA). Contact with a tumor polypeptide (100 ng/ml -100 μg/ml, preferably 200 ng/ml -25 μg/ml) for 3-7 days will typically result in at least a two fold increase in proliferation of the T cells. Contact as described above for 2-3 hours should result in activation of the T cells, as measured using standard cytokine assays in which a two fold increase in the level of cytokine release (e.g., TNF or IFN-γ) is indicative of T cell activation (see Coligan et al., Current Protocols in Immunology, vol. 1, Wiley Interscience (Greene 1998)). T cells that have been activated in response to a tumor polypeptide, polynucleotide or polypeptide-expressing APC may be CD4⁺ and/or CD8⁺. Tumor polypeptide-specific T cells may be expanded using standard techniques. Within preferred embodiments, the T cells are derived from a patient, a related donor or an unrelated donor, and are administered to the patient following stimulation and expansion.

[1330] For therapeutic purposes, CD4⁺ or CD8⁺ T cells that proliferate in response to a tumor polypeptide, polynucleotide or APC can be expanded in number either in vitro or in vivo. Proliferation of such T cells in vitro may be accomplished in a variety of ways. For example, the T cells can be re-exposed to a tumor polypeptide, or a short peptide corresponding to an immunogenic portion of such a polypeptide, with or without the addition of T cell growth factors, such as interleukin-2, and/or stimulator cells that synthesize a tumor polypeptide. Alternatively, one or more T cells that proliferate in the presence of the tumor polypeptide can be expanded in number by cloning. Methods for cloning cells are well known in the art, and include limiting dilution.

[1331] T Cell Receptor Compositions

[1332] The T cell receptor (TCR) consists of 2 different, highly variable polypeptide chains, termed the T-cell receptor α and β chains, that are linked by a disulfide bond (Janeway, Travers, Walport. Immunobiology. Fourth Ed., 148-159. Elsevier Science Ltd/Garland Publishing. 1999). The α/β heterodimer complexes with the invariant CD3 chains at the cell membrane. This complex recognizes specific antigenic peptides bound to MHC molecules. The enormous diversity of TCR specificities is generated much like immunoglobulin diversity, through somatic gene rearrangement. The β chain genes contain over 50 variable (V), 2 diversity (D), over 10 joining (J) segments, and 2 constant region segments (C). The α chain genes contain over 70 V segments, and over 60 J segments but no D segments, as well as one C segment. During T cell development in the thymus, the D to J gene rearrangement of the β chain occurs, followed by the V gene segment rearrangement to the DJ. This functional VDJ_{β} exon is transcribed and spliced to join to a C_{β}. For the α chain, a V_{α} gene segment rearranges to a J_{α} gene segment to create the functional exon that is then transcribed and spliced to the C_{α}. Diversity is further increased during the recombination process by the random addition of P and N-nucleotides between the V, D, and J segments of the β chain and between the V and J segments in the a chain (Janeway, Travers, Walport. Immunobiology. Fourth Ed., 98 and 150. Elsevier Science Ltd/Garland Publishing. 1999).

[1333] The present invention, in another aspect, provides TCRs specific for a polypeptide disclosed herein, or for a variant or derivative thereof. In accordance with the present invention, polynucleotide and amino acid sequences are provided for the V-J or V-D-J junctional regions or parts thereof for the alpha and beta chains of the T-cell receptor which recognize tumor polypeptides described herein. In general, this aspect of the invention relates to T-cell receptors which recognize or bind tumor polypeptides presented in the context of MHC. In a preferred embodiment the tumor antigens recognized by the T-cell receptors comprise a polypeptide of the present invention. For example, cDNA encoding a TCR specific for a colon tumor peptide can be isolated from T cells specific for a tumor polypeptide using standard molecular biological and recombinant DNA techniques.

[1334] This invention further includes the T-cell receptors or analogs thereof having substantially the same function or activity as the T-cell receptors of this invention which recognize or bind tumor polypeptides. Such receptors include, but are not limited to, a fragment of the receptor, or a substitution, addition or deletion mutant of a T-cell receptor provided herein. This invention also encompasses polypeptides or peptides that are substantially homologous to the T-cell receptors provided herein or that retain substantially the same activity. The term “analog” includes any protein or polypeptide having an amino acid residue sequence substantially identical to the T-cell receptors provided herein in which one or more residues, preferably no more than 5 residues, more preferably no more than 25 residues have been conservatively substituted with a functionally similar residue and which displays the functional aspects of the T-cell receptor as described herein.

[1335] The present invention further provides for suitable mammalian host cells, for example, non-specific T cells, that are transfected with a polynucleotide encoding TCRs specific for a polypeptide described herein, thereby rendering the host cell specific for the polypeptide. The α and β chains of the TCR may be contained on separate expression vectors or alternatively, on a single expression vector that also contains an internal ribosome entry site (IRES) for cap-independent translation of the gene downstream of the IRES. Said host cells expressing TCRs specific for the polypeptide may be used, for example, for adoptive immunotherapy of colon cancer as discussed further below.

[1336] In further aspects of the present invention, cloned TCRs specific for a polypeptide recited herein may be used in a kit for the diagnosis of colon cancer. For example, the nucleic acid sequence or portions thereof, of tumor-specific TCRs can be used as probes or primers for the detection of expression of the rearranged genes enconding the specific TCR in a biological sample. Therefore, the present invention further provides for an assay for detecting messenger RNA or DNA encoding the TCR specific for a polypeptide.

[1337] Pharmaceutical Compositions

[1338] In additional embodiments, the present invention concerns formulation of one or more of the polynucleotide, polypeptide, T-cell, TCR, and/or antibody compositions disclosed herein in pharmaceutically-acceptable carriers for administration to a cell or an animal, either alone, or in combination with one or more other modalities of therapy.

[1339] It will be understood that, if desired, a composition as disclosed herein may be administered in combination with other agents as well, such as, e.g., other proteins or polypeptides or various pharmaceutically-active agents. In fact, there is virtually no limit to other components that may also be included, given that the additional agents do not cause a significant adverse effect upon contact with the target cells or host tissues. The compositions may thus be delivered along with various other agents as required in the particular instance. Such compositions may be purified from host cells or other biological sources, or alternatively may be chemically synthesized as described herein. Likewise, such compositions may further comprise substituted or derivatized RNA or DNA compositions.

[1340] Therefore, in another aspect of the present invention, pharmaceutical compositions are provided comprising one or more of the polynucleotide, polypeptide, antibody, TCR, and/or T-cell compositions described herein in combination with a physiologically acceptable carrier. In certain preferred embodiments, the pharmaceutical compositions of the invention comprise immunogenic polynucleotide and/or polypeptide compositions of the invention for use in prophylactic and theraputic vaccine applications. Vaccine preparation is generally described in, for example, M. F. Powell and M. J. Newman, eds., “Vaccine Design (the subunit and adjuvant approach),” Plenum Press (NY, 1995). Generally, such compositions will comprise one or more polynucleotide and/or polypeptide compositions of the present invention in combination with one or more immunostimulants.

[1341] It will be apparent that any of the pharmaceutical compositions described herein can contain pharmaceutically acceptable salts off the polynucleotides and polypeptides of the invention. Such salts can be prepared, for example, from pharmaceutically acceptable non-toxic bases, including organic bases (e.g., salts of primary, secondary and tertiary amines and basic amino acids) and inorganic bases (e.g., sodium, potassium, lithium, ammonium, calcium and magnesium salts).

[1342] In another embodiment, illustrative immunogenic compositions, e.g., vaccine compositions, of the present invention comprise DNA encoding one or more of the polypeptides as described above, such that the polypeptide is generated in situ. As noted above, the polynucleotide may be administered within any of a variety of delivery systems known to those of ordinary skill in the art. Indeed, numerous gene delivery techniques are well known in the art, such as those described by Rolland, Crit. Rev. Therap. Drug Carrier Systems 15:143-198, 1998, and references cited therein. Appropriate polynucleotide expression systems will, of course, contain the necessary regulatory DNA regulatory sequences for expression in a patient (such as a suitable promoter and terminating signal). Alternatively, bacterial delivery systems may involve the administration of a bacterium (such as Bacillus-Calmette-Guerrin) that expresses an immunogenic portion of the polypeptide on its cell surface or secretes such an epitope.

[1343] Therefore, in certain embodiments, polynucleotides encoding immunogenic polypeptides described herein are introduced into suitable mammalian host cells for expression using any of a number of known viral-based systems. In one illustrative embodiment, retroviruses provide a convenient and effective platform for gene delivery systems. A selected nucleotide sequence encoding a polypeptide of the present invention can be inserted into a vector and packaged in retroviral particles using techniques known in the art. The recombinant virus can then be isolated and delivered to a subject. A number of illustrative retroviral systems have been described (e.g., U.S. Pat. No. 5,219,740; Miller and Rosman (1989) BioTechniques 7:980-990; Miller, A. D. (1990) Human Gene Therapy 1:5-14; Scarpa et al. (1991) Virology 180:849-852; Burns et al. (1993) Proc. Natl. Acad. Sci. USA 90:8033-8037; and Boris-Lawrie and Temin (1993) Cur. Opin. Genet. Develop. 3:102-109.

[1344] In addition, a number of illustrative adenovirus-based systems have also been described. Unlike retroviruses which integrate into the host genome, adenoviruses persist extrachromosomally thus minimizing the risks associated with insertional mutagenesis (Haj-Ahmad and Graham (1986) J. Virol. 57:267-274; Bett et al. (1993) J. Virol. 67:5911-5921; Mittereder et al. (1994) Human Gene Therapy 5:717-729; Seth et al. (1994) J. Virol. 68:933-940; Barr et al. (1994) Gene Therapy 1:51-58; Berkner, K. L. (1988) BioTechniques 6:616-629; and Rich et al. (1993) Human Gene Therapy 4:461-476).

[1345] Various adeno-associated virus (AAV) vector systems have also been developed for polynucleotide delivery. AAV vectors can be readily constructed using techniques well known in the art. See, e.g., U.S. Pat. Nos. 5,173,414 and 5,139,941; International Publication Nos. WO 92/01070 and WO 93/03769; Lebkowski et al. (1988) Molec. Cell. Biol. 8:3988-3996; Vincent et al. (1990) Vaccines 90 (Cold Spring Harbor Laboratory Press); Carter, B. J. (1992) Current Opinion in Biotechnology 3:533-539; Muzyczka, N. (1992) Current Topics in Microbiol. and Immunol. 158:97-129; Kotin, R. M. (1994) Human Gene Therapy 5:793-801; Shelling and Smith (1994) Gene Therapy 1:165-169; and Zhou et al. (1994) J. Exp. Med. 179:1867-1875.

[1346] Additional viral vectors useful for delivering the polynucleotides encoding polypeptides of the present invention by gene transfer include those derived from the pox family of viruses, such as vaccinia virus and avian poxvirus. By way of example, vaccinia virus recombinants expressing the novel molecules can be constructed as follows. The DNA encoding a polypeptide is first inserted into an appropriate vector so that it is adjacent to a vaccinia promoter and flanking vaccinia DNA sequences, such as the sequence encoding thymidine kinase (TK). This vector is then used to transfect cells which are simultaneously infected with vaccinia. Homologous recombination serves to insert the vaccinia promoter plus the gene encoding the polypeptide of interest into the viral genome. The resulting TK.sup.(−) recombinant can be selected by culturing the cells in the presence of 5-bromodeoxyuridine and picking viral plaques resistant thereto.

[1347] A vaccinia-based infection/transfection system can be conveniently used to provide for inducible, transient expression or coexpression of one or more polypeptides described herein in host cells of an organism. In this particular system, cells are first infected in vitro with a vaccinia virus recombinant that encodes the bacteriophage T7 RNA polymerase. This polymerase displays exquisite specificity in that it only transcribes templates bearing T7 promoters. Following infection, cells are transfected with the polynucleotide or polynucleotides of interest, driven by a T7 promoter. The polymerase expressed in the cytoplasm from the vaccinia virus recombinant transcribes the transfected DNA into RNA which is then translated into polypeptide by the host translational machinery. The method provides for high level, transient, cytoplasmic production of large quantities of RNA and its translation products. See, e.g., Elroy-Stein and Moss, Proc. Natl. Acad. Sci. USA (1990) 87:6743-6747; Fuerst et al. Proc. Natl. Acad. Sci. USA (1986) 83:8122-8126.

[1348] Alternatively, avipoxviruses, such as the fowlpox and canarypox viruses, can also be used to deliver the coding sequences of interest. Recombinant avipox viruses, expressing immunogens from mammalian pathogens, are known to confer protective immunity when administered to non-avian species. The use of an Avipox vector is particularly desirable in human and other mammalian species since members of the Avipox genus can only productively replicate in susceptible avian species and therefore are not infective in mammalian cells. Methods for producing recombinant Avipoxviruses are known in the art and employ genetic recombination, as described above with respect to the production of vaccinia viruses. See, e.g., WO 91/12882; WO 89/03429; and WO 92/03545.

[1349] Any of a number of alphavirus vectors can also be used for delivery of polynucleotide compositions of the present invention, such as those vectors described in U.S. Pat. Nos. 5,843,723; 6,015,686; 6,008,035 and 6,015,694. Certain vectors based on Venezuelan Equine Encephalitis (VEE) can also be used, illustrative examples of which can be found in U.S. Pat. Nos. 5,505,947 and 5,643,576.

[1350] Moreover, molecular conjugate vectors, such as the adenovirus chimeric vectors described in Michael et al. J. Biol. Chem. (1993) 268:6866-6869 and Wagner et al. Proc. Natl. Acad. Sci. USA (1992) 89:6099-6103, can also be used for gene delivery under the invention.

[1351] Additional illustrative information on these and other known viral-based delivery systems can be found, for example, in Fisher-Hoch et al., Proc. Natl. Acad. Sci. USA 86:317-321, 1989; Flexner et al., Ann. N.Y Acad. Sci. 569:86-103, 1989; Flexner et al., Vaccine 8:17-21, 1990; U.S. Pat. Nos. 4,603,112, 4,769,330, and 5,017,487; WO 89/01973; U.S. Pat. No. 4,777,127; GB 2,200,651; EP 0,345,242; WO 91/02805; Berkner, Biotechniques 6:616-627, 1988; Rosenfeld et al., Science 252:431-434, 1991; Kolls et al., Proc. Natl. Acad. Sci. USA 91:215-219, 1994; Kass-Eisler et al., Proc. Natl. Acad. Sci. USA 90:11498-11502, 1993; Guzman et al., Circulation 88:2838-2848, 1993; and Guzman et al., Cir. Res. 73:1202-1207, 1993.

[1352] In certain embodiments, a polynucleotide may be integrated into the genome of a target cell. This integration may be in the specific location and orientation via homologous recombination (gene replacement) or it may be integrated in a random, non-specific location (gene augmentation). In yet further embodiments, the polynucleotide may be stably maintained in the cell as a separate, episomal segment of DNA. Such polynucleotide segments or “episomes” encode sequences sufficient to permit maintenance and replication independent of or in synchronization with the host cell cycle. The manner in which the expression construct is delivered to a cell and where in the cell the polynucleotide remains is dependent on the type of expression construct employed.

[1353] In another embodiment of the invention, a polynucleotide is administered/delivered as “naked” DNA, for example as described in Ulmer et al., Science 259:1745-1749, 1993 and reviewed by Cohen, Science 259:1691-1692, 1993. The uptake of naked DNA may be increased by coating the DNA onto biodegradable beads, which are efficiently transported into the cells.

[1354] In still another embodiment, a composition of the present invention can be delivered via a particle bombardment approach, many of which have been described. In one illustrative example, gas-driven particle acceleration can be achieved with devices such as those manufactured by Powderject Pharmaceuticals PLC (Oxford, UK) and Powderject Vaccines Inc. (Madison, Wis.), some examples of which are described in U.S. Pat. Nos. 5,846,796; 6,010,478; 5,865,796; 5,584,807; and EP Patent No. 0500 799. This approach offers a needle-free delivery approach wherein a dry powder formulation of microscopic particles, such as polynucleotide or polypeptide particles, are accelerated to high speed within a helium gas jet generated by a hand held device, propelling the particles into a target tissue of interest.

[1355] In a related embodiment, other devices and methods that may be useful for gas-driven needle-less injection of compositions of the present invention include those provided by Bioject, Inc. (Portland, Oreg.), some examples of which are described in U.S. Pat. Nos. 4,790,824; 5,064,413; 5,312,335; 5,383,851; 5,399,163; 5,520,639 and 5,993,412.

[1356] According to another embodiment, the pharmaceutical compositions described herein will comprise one or more immunostimulants in addition to the immunogenic polynucleotide, polypeptide, antibody, T-cell, TCR, and/or APC compositions of this invention. An immunostimulant refers to essentially any substance that enhances or potentiates an immune response (antibody and/or cell-mediated) to an exogenous antigen. One preferred type of immunostimulant comprises an adjuvant. Many adjuvants contain a substance designed to protect the antigen from rapid catabolism, such as aluminum hydroxide or mineral oil, and a stimulator of immune responses, such as lipid A, Bortadella pertussis or Mycobacterium tuberculosis derived proteins. Certain adjuvants are commercially available as, for example, Freund's Incomplete Adjuvant and Complete Adjuvant (Difco Laboratories, Detroit, Mich.); Merck Adjuvant 65 (Merck and Company, Inc., Rahway, N.J.); AS-2 (SmithKline Beecham, Philadelphia, Pa.); aluminum salts such as aluminum hydroxide gel (alum) or aluminum phosphate; salts of calcium, iron or zinc; an insoluble suspension of acylated tyrosine; acylated sugars; cationically or anionically derivatized polysaccharides; polyphosphazenes; biodegradable microspheres; monophosphoryl lipid A and quil A. Cytokines, such as GM-CSF, interleukin-2, -7, -12, and other like growth factors, may also be used as adjuvants.

[1357] Within certain embodiments of the invention, the adjuvant composition is preferably one that induces an immune response predominantly of the Th1 type. High levels of Th1-type cytokines (e.g., IFN-γ, TNFα, IL-2 and IL-12) tend to favor the induction of cell mediated immune responses to an administered antigen. In contrast, high levels of Th2-type cytokines (e.g., IL-4, IL-5, IL-6 and IL-10) tend to favor the induction of humoral immune responses. Following application of a vaccine as provided herein, a patient will support an immune response that includes Th1- and Th2-type responses. Within a preferred embodiment, in which a response is predominantly Th1-type, the level of Th1-type cytokines will increase to a greater extent than the level of Th2-type cytokines. The levels of these cytokines may be readily assessed using standard assays. For a review of the families of cytokines, see Mosmann and Coffman, Ann. Rev. Immunol. 7:145-173, 1989.

[1358] Certain preferred adjuvants for eliciting a predominantly Th1-type response include, for example, a combination of monophosphoryl lipid A, preferably 3-de-O-acylated monophosphoryl lipid A, together with an aluminum salt. MPL® adjuvants are available from Corixa Corporation (Seattle, Wash.; see, for example, U.S. Pat. Nos. 4,436,727; 4,877,611; 4,866,034 and 4,912,094). CpG-containing oligonucleotides (in which the CpG dinucleotide is unmethylated) also induce a predominantly Th1 response. Such oligonucleotides are well known and are described, for example, in WO 96/02555, WO 99/33488 and U.S. Pat. Nos. 6,008,200 and 5,856,462. Immunostimulatory DNA sequences are also described, for example, by Sato et al., Science 273:352, 1996. Another preferred adjuvant comprises a saponin, such as Quil A, or derivatives thereof, including QS21 and QS7 (Aquila Biopharmaceuticals Inc., Framingham, Mass.); Escin; Digitonin; or Gypsophila or Chenopodium quinoa saponins . Other preferred formulations include more than one saponin in the adjuvant combinations of the present invention, for example combinations of at least two of the following group comprising QS21, QS7, Quil A, β-escin, or digitonin.

[1359] Alternatively the saponin formulations may be combined with vaccine vehicles composed of chitosan or other polycationic polymers, polylactide and polylactide-co-glycolide particles, poly-N-acetyl glucosamine-based polymer matrix, particles composed of polysaccharides or chemically modified polysaccharides, liposomes and lipid-based particles, particles composed of glycerol monoesters, etc. The saponins may also be formulated in the presence of cholesterol to form particulate structures such as liposomes or ISCOMs. Furthermore, the saponins may be formulated together with a polyoxyethylene ether or ester, in either a non-particulate solution or suspension, or in a particulate structure such as a paucilamelar liposome or ISCOM. The saponins may also be formulated with excipients such as Carbopol^{R} to increase viscosity, or may be formulated in a dry powder form with a powder excipient such as lactose.

[1360] In one preferred embodiment, the adjuvant system includes the combination of a monophosphoryl lipid A and a saponin derivative, such as the combination of QS21 and 3D-MPL® adjuvant, as described in WO 94/00153, or a less reactogenic composition where the QS21 is quenched with cholesterol, as described in WO 96/33739. Other preferred formulations comprise an oil-in-water emulsion and tocopherol. Another particularly preferred adjuvant formulation employing QS21, 3D-MPL® adjuvant and tocopherol in an oil-in-water emulsion is described in WO 95/17210.

[1361] Another enhanced adjuvant system involves the combination of a CpG-containing oligonucleotide and a saponin derivative particularly the combination of CpG and QS21 is disclosed in WO 00/09159. Preferably the formulation additionally comprises an oil in water emulsion and tocopherol.

[1362] Additional illustrative adjuvants for use in the pharmaceutical compositions of the invention include Montanide ISA 720 (Seppic, France), SAF (Chiron, Calif., United States), ISCOMS (CSL), MF-59 (Chiron), the SBAS series of adjuvants (e.g., SBAS-2 or SBAS-4, available from SmithKline Beecham, Rixensart, Belgium), Detox (Enhanzyno) (Corixa, Hamilton, Mont.), RC-529 (Corixa, Hamilton, Mont.) and other aminoalkyl glucosaminide 4-phosphates (AGPs), such as those described in pending U.S. patent application Ser. Nos. 08/853,826 and 09/074,720, the disclosures of which are incorporated herein by reference in their entireties, and polyoxyethylene ether adjuvants such as those described in WO 99/52549A1.

[1363] Other preferred adjuvants include adjuvant molecules of the general formula

HO(CH₂CH₂O)ₙ—A—R, (I)

[1364] wherein, n is 1-50, A is a bond or —C(O)—, R is C₁₋₅₀ alkyl or Phenyl C₁₋₅₀ alkyl.

[1365] One embodiment of the present invention consists of a vaccine formulation comprising a polyoxyethylene ether of general formula (I), wherein n is between 1 and 50, preferably 4-24, most preferably 9; the R component is C₁₋₅₀, preferably C₄-C₂₀ alkyl and most preferably C₁₂ alkyl, and A is a bond. The concentration of the polyoxyethylene ethers should be in the range 0.1-20%, preferably from 0.1-10%, and most preferably in the range 0.1-1%. Preferred polyoxyethylene ethers are selected from the following group: polyoxyethylene-9-lauryl ether, polyoxyethylene-9-steoryl ether, polyoxyethylene-8-steoryl ether, polyoxyethylene-4-lauryl ether, polyoxyethylene-35-lauryl ether, and polyoxyethylene-23-lauryl ether. Polyoxyethylene ethers such as polyoxyethylene lauryl ether are described in the Merck index (12^{th} edition: entry 7717). These adjuvant molecules are described in WO 99/52549.

[1366] The polyoxyethylene ether according to the general formula (I) above may, if desired, be combined with another adjuvant. For example, a preferred adjuvant combination is preferably with CpG as described in the pending UK patent application GB 9820956.2.

[1367] According to another embodiment of this invention, an immunogenic composition described herein is delivered to a host via antigen presenting cells (APCs), such as dendritic cells, macrophages, B cells, monocytes and other cells that may be engineered to be efficient APCs. Such cells may, but need not, be genetically modified to increase the capacity for presenting the antigen, to improve activation and/or maintenance of the T cell response, to have anti-tumor effects per se and/or to be immunologically compatible with the receiver (i.e., matched HLA haplotype). APCs may generally be isolated from any of a variety of biological fluids and organs, including tumor and peritumoral tissues, and may be autologous, allogeneic, syngeneic or xenogeneic cells.

[1368] Certain preferred embodiments of the present invention use dendritic cells or progenitors thereof as antigen-presenting cells. Dendritic cells are highly potent APCs (Banchereau and Steinman, Nature 392:245-251, 1998) and have been shown to be effective as a physiological adjuvant for eliciting prophylactic or therapeutic antitumor immunity (see Timmerman and Levy, Ann. Rev. Med. 50:507-529, 1999). In general, dendritic cells may be identified based on their typical shape (stellate in situ, with marked cytoplasmic processes (dendrites) visible in vitro), their ability to take up, process and present antigens with high efficiency and their ability to activate naive T cell responses. Dendritic cells may, of course, be engineered to express specific cell-surface receptors or ligands that are not commonly found on dendritic cells in vivo or ex vivo, and such modified dendritic cells are contemplated by the present invention. As an alternative to dendritic cells, secreted vesicles antigen-loaded dendritic cells (called exosomes) may be used within a vaccine (see Zitvogel et al., Nature Med. 4:594-600, 1998).

[1369] Dendritic cells and progenitors may be obtained from peripheral blood, bone marrow, tumor-infiltrating cells, peritumoral tissues-infiltrating cells, lymph nodes, spleen, skin, umbilical cord blood or any other suitable tissue or fluid. For example, dendritic cells may be differentiated ex vivo by adding a combination of cytokines such as GM-CSF, IL-4, IL-13 and/or TNFα to cultures of monocytes harvested from peripheral blood. Alternatively, CD34 positive cells harvested from peripheral blood, umbilical cord blood or bone marrow may be differentiated into dendritic cells by adding to the culture medium combinations of GM-CSF, IL-3, TNFα, CD40 ligand, LPS, flt3 ligand and/or other compound(s) that induce differentiation, maturation and proliferation of dendritic cells.

[1370] Dendritic cells are conveniently categorized as “immature” and “mature” cells, which allows a simple way to discriminate between two well characterized phenotypes. However, this nomenclature should not be construed to exclude all possible intermediate stages of differentiation. Immature dendritic cells are characterized as APC with a high capacity for antigen uptake and processing, which correlates with the high expression of Fcγ receptor and mannose receptor. The mature phenotype is typically characterized by a lower expression of these markers, but a high expression of cell surface molecules responsible for T cell activation such as class I and class II MHC, adhesion molecules (e.g., CD54 and CD11) and costimulatory molecules (e.g., CD40, CD80, CD86 and 4-1BB).

[1371] APCs may generally be transfected with a polynucleotide of the invention (or portion or other variant thereof) such that the encoded polypeptide, or an immunogenic portion thereof, is expressed on the cell surface. Such transfection may take place ex vivo, and a pharmaceutical composition comprising such transfected cells may then be used for therapeutic purposes, as described herein. Alternatively, a gene delivery vehicle that targets a dendritic or other antigen presenting cell may be administered to a patient, resulting in transfection that occurs in vivo. In vivo and ex vivo transfection of dendritic cells, for example, may generally be performed using any methods known in the art, such as those described in WO 97/24447, or the gene gun approach described by Mahvi et al., Immunology and cell Biology 75:456-460, 1997. Antigen loading of dendritic cells may be achieved by incubating dendritic cells or progenitor cells with the tumor polypeptide, DNA (naked or within a plasmid vector) or RNA; or with antigen-expressing recombinant bacterium or viruses (e.g., vaccinia, fowlpox, adenovirus or lentivirus vectors). Prior to loading, the polypeptide may be covalently conjugated to an immunological partner that provides T cell help (e.g., a carrier molecule). Alternatively, a dendritic cell may be pulsed with a non-conjugated immunological partner, separately or in the presence of the polypeptide.

[1372] While any suitable carrier known to those of ordinary skill in the art may be employed in the pharmaceutical compositions of this invention, the type of carrier will typically vary depending on the mode of administration. Compositions of the present invention may be formulated for any appropriate manner of administration, including for example, topical, oral, nasal, mucosal, intravenous, intracranial, intraperitoneal, subcutaneous and intramuscular administration.

[1373] Carriers for use within such pharmaceutical compositions are biocompatible, and may also be biodegradable. In certain embodiments, the formulation preferably provides a relatively constant level of active component release. In other embodiments, however, a more rapid rate of release immediately upon administration may be desired. The formulation of such compositions is well within the level of ordinary skill in the art using known techniques. Illustrative carriers useful in this regard include microparticles of poly(lactide-co-glycolide), polyacrylate, latex, starch, cellulose, dextran and the like. Other illustrative delayed-release carriers include supramolecular biovectors, which comprise a non-liquid hydrophilic core (e.g., a cross-linked polysaccharide or oligosaccharide) and, optionally, an external layer comprising an amphiphilic compound, such as a phospholipid (see e.g., U.S. Pat. No. 5,151,254 and PCT applications WO 94/20078, WO/94/23701 and WO 96/06638). The amount of active compound contained within a sustained release formulation depends upon the site of implantation, the rate and expected duration of release and the nature of the condition to be treated or prevented.

[1374] In another illustrative embodiment, biodegradable microspheres (e.g., polylactate polyglycolate) are employed as carriers for the compositions of this invention. Suitable biodegradable microspheres are disclosed, for example, in U.S. Pat. Nos. 4,897,268; 5,075,109; 5,928,647; 5,811,128; 5,820,883; 5,853,763; 5,814,344, 5,407,609 and 5,942,252. Modified hepatitis B core protein carrier systems. such as described in WO/99 40934, and references cited therein, will also be useful for many applications. Another illustrative carrier/delivery system employs a carrier comprising particulate-protein complexes, such as those described in U.S. Pat. No. 5,928,647, which are capable of inducing a class I-restricted cytotoxic T lymphocyte responses in a host.

[1375] In another illustrative embodiment, calcium phosphate core particles are employed as carriers, vaccine adjuvants, or as controlled release matrices for the compositions of this invention. Exemplary calcium phosphate particles are disclosed, for example, in published patent application No. WO/0046147.

[1376] The pharmaceutical compositions of the invention will often further comprise one or more buffers (e.g., neutral buffered saline or phosphate buffered saline), carbohydrates (e.g., glucose, mannose, sucrose or dextrans), mannitol, proteins, polypeptides or amino acids such as glycine, antioxidants, bacteriostats, chelating agents such as EDTA or glutathione, adjuvants (e.g, aluminum hydroxide), solutes that render the formulation isotonic, hypotonic or weakly hypertonic with the blood of a recipient, suspending agents, thickening agents and/or preservatives. Alternatively, compositions of the present invention may be formulated as a lyophilizate.

[1377] The pharmaceutical compositions described herein may be presented in unit-dose or multi-dose containers, such as sealed ampoules or vials. Such containers are typically sealed in such a way to preserve the sterility and stability of the formulation until use. In general, formulations may be stored as suspensions, solutions or emulsions in oily or aqueous vehicles. Alternatively, a pharmaceutical composition may be stored in a freeze-dried condition requiring only the addition of a sterile liquid carrier immediately prior to use.

[1378] The development of suitable dosing and treatment regimens for using the particular compositions described herein in a variety of treatment regimens, including e.g., oral, parenteral, intravenous, intranasal, and intramuscular administration and formulation, is well known in the art, some of which are briefly discussed below for general purposes of illustration.

[1379] In certain applications, the pharmaceutical compositions disclosed herein may be delivered via oral administration to an animal. As such, these compositions may be formulated with an inert diluent or with an assimilable edible carrier, or they may be enclosed in hard- or soft-shell gelatin capsule, or they may be compressed into tablets, or they may be incorporated directly with the food of the diet.

[1380] The active compounds may even be incorporated with excipients and used in the form of ingestible tablets, buccal tables, troches, capsules, elixirs, suspensions, syrups, wafers, and the like (see, for example, Mathiowitz et al., Nature Mar. 27, 1997;386(6623):410-4; Hwang et al., Crit Rev Ther Drug Carrier Syst 1998;15(3):243-84; U.S Pat. No. 5,641,515; U.S. Pat. No. 5,580,579 and U.S. Pat. No. 5,792,451). Tablets, troches, pills, capsules and the like may also contain any of a variety of additional components, for example, a binder, such as gum tragacanth, acacia, cornstarch, or gelatin; excipients, such as dicalcium phosphate; a disintegrating agent, such as corn starch, potato starch, alginic acid and the like; a lubricant, such as magnesium stearate; and a sweetening agent, such as sucrose, lactose or saccharin may be added or a flavoring agent, such as peppermint, oil of wintergreen, or cherry flavoring. When the dosage unit form is a capsule, it may contain, in addition to materials of the above type, a liquid carrier. Various other materials may be present as coatings or to otherwise modify the physical form of the dosage unit. For instance, tablets, pills, or capsules may be coated with shellac, sugar, or both. Of course, any material used in preparing any dosage unit form should be pharmaceutically pure and substantially non-toxic in the amounts employed. In addition, the active compounds may be incorporated into sustained-release preparation and formulations.

[1381] Typically, these formulations will contain at least about 0.1% of the active compound or more, although the percentage of the active ingredient(s) may, of course, be varied and may conveniently be between about 1 or 2% and about 60% or 70% or more of the weight or volume of the total formulation. Naturally, the amount of active compound(s) in each therapeutically useful composition may be prepared is such a way that a suitable dosage will be obtained in any given unit dose of the compound. Factors such as solubility, bioavailability, biological half-life, route of administration, product shelf life, as well as other pharmacological considerations will be contemplated by one skilled in the art of preparing such pharmaceutical formulations, and as such, a variety of dosages and treatment regimens may be desirable.

[1382] For oral administration the compositions of the present invention may alternatively be incorporated with one or more excipients in the form of a mouthwash, dentifrice, buccal tablet, oral spray, or sublingual orally-administered formulation. Alternatively, the active ingredient may be incorporated into an oral solution such as one containing sodium borate, glycerin and potassium bicarbonate, or dispersed in a dentifrice, or added in a therapeutically-effective amount to a composition that may include water, binders, abrasives, flavoring agents, foaming agents, and humectants. Alternatively the compositions may be fashioned into a tablet or solution form that may be placed under the tongue or otherwise dissolved in the mouth.

[1383] In certain circumstances it will be desirable to deliver the pharmaceutical compositions disclosed herein parenterally, intravenously, intramuscularly, or even intraperitoneally. Such approaches are well known to the skilled artisan, some of which are further described, for example, in U.S. Pat. No. 5,543,158; U.S. Pat. No. 5,641,515 and U.S. Pat. No. 5,399,363. In certain embodiments, solutions of the active compounds as free base or pharmacologically acceptable salts may be prepared in water suitably mixed with a surfactant, such as hydroxypropylcellulose. Dispersions may also be prepared in glycerol, liquid polyethylene glycols, and mixtures thereof and in oils. Under ordinary conditions of storage and use, these preparations generally will contain a preservative to prevent the growth of microorganisms.

[1384] Illustrative pharmaceutical forms suitable for injectable use include sterile aqueous solutions or dispersions and sterile powders for the extemporaneous preparation of sterile injectable solutions or dispersions (for example, see U.S. Pat. No. 5,466,468). In all cases the form must be sterile and must be fluid to the extent that easy syringability exists. It must be stable under the conditions of manufacture and storage and must be preserved against the contaminating action of microorganisms, such as bacteria and fungi. The carrier can be a solvent or dispersion medium containing, for example, water, ethanol, polyol (e.g., glycerol, propylene glycol, and liquid polyethylene glycol, and the like), suitable mixtures thereof, and/or vegetable oils. Proper fluidity may be maintained, for example, by the use of a coating, such as lecithin, by the maintenance of the required particle size in the case of dispersion and/or by the use of surfactants. The prevention of the action of microorganisms can be facilitated by various antibacterial and antifungal agents, for example, parabens, chlorobutanol, phenol, sorbic acid, thimerosal, and the like. In many cases, it will be preferable to include isotonic agents, for example, sugars or sodium chloride. Prolonged absorption of the injectable compositions can be brought about by the use in the compositions of agents delaying absorption, for example, aluminum monostearate and gelatin.

[1385] In one embodiment, for parenteral administration in an aqueous solution, the solution should be suitably buffered if necessary and the liquid diluent first rendered isotonic with sufficient saline or glucose. These particular aqueous solutions are especially suitable for intravenous, intramuscular, subcutaneous and intraperitoneal administration. In this connection, a sterile aqueous medium that can be employed will be known to those of skill in the art in light of the present disclosure. For example, one dosage may be dissolved in 1 ml of isotonic NaCl solution and either added to 1000 ml of hypodermoclysis fluid or injected at the proposed site of infusion, (see for example, “Remington's Pharmaceutical Sciences” 15th Edition, pages 1035-1038 and 1570-1580). Some variation in dosage will necessarily occur depending on the condition of the subject being treated. Moreover, for human administration, preparations will of course preferably meet sterility, pyrogenicity, and the general safety and purity standards as required by FDA Office of Biologics standards.

[1386] In another embodiment of the invention, the compositions disclosed herein may be formulated in a neutral or salt form. Illustrative pharmaceutically-acceptable salts include the acid addition salts (formed with the free amino groups of the protein) and which are formed with inorganic acids such as, for example, hydrochloric or phosphoric acids, or such organic acids as acetic, oxalic, tartaric, mandelic, and the like. Salts formed with the free carboxyl groups can also be derived from inorganic bases such as, for example, sodium, potassium, ammonium, calcium, or ferric hydroxides, and such organic bases as isopropylamine, trimethylamine, histidine, procaine and the like. Upon formulation, solutions will be administered in a manner compatible with the dosage formulation and in such amount as is therapeutically effective.

[1387] The carriers can further comprise any and all solvents, dispersion media, vehicles, coatings, diluents, antibacterial and antifungal agents, isotonic and absorption delaying agents, buffers, carrier solutions, suspensions, colloids, and the like. The use of such media and agents for pharmaceutical active substances is well known in the art. Except insofar as any conventional media or agent is incompatible with the active ingredient, its use in the therapeutic compositions is contemplated. Supplementary active ingredients can also be incorporated into the compositions. The phrase “pharmaceutically-acceptable” refers to molecular entities and compositions that do not produce an allergic or similar untoward reaction when administered to a human.

[1388] In certain embodiments, the pharmaceutical compositions may be delivered by intranasal sprays, inhalation, and/or other aerosol delivery vehicles. Methods for delivering genes, nucleic acids, and peptide compositions directly to the lungs via nasal aerosol sprays has been described, e.g., in U.S. Pat. No. 5,756,353 and U.S. Pat. No. 5,804,212. Likewise, the delivery of drugs using intranasal microparticle resins (Takenaga et al., J Controlled Release Mar. 2, 1998;52(1-2):81-7) and lysophosphatidyl-glycerol compounds (U.S. Pat. No. 5,725,871) are also well-known in the pharmaceutical arts. Likewise, illustrative transmucosal drug delivery in the form of a polytetrafluoroetheylene support matrix is described in U.S. Pat. No. 5,780,045.

[1389] In certain embodiments, liposomes, nanocapsules, microparticles, lipid particles, vesicles, and the like, are used for the introduction of the compositions of the present invention into suitable host cells/organisms. In particular, the compositions of the present invention may be formulated for delivery either encapsulated in a lipid particle, a liposome, a vesicle, a nanosphere, or a nanoparticle or the like. Alternatively, compositions of the present invention can be bound, either covalently or non-covalently, to the surface of such carrier vehicles.

[1390] The formation and use of liposome and liposome-like preparations as potential drug carriers is generally known to those of skill in the art (see for example, Lasic, Trends Biotechnol July 1998;16(7):307-21; Takakura, Nippon Rinsho March 1998;56(3):691-5; Chandran et al., Indian J Exp Biol. August 1997;35(8):801-9; Margalit, Crit Rev Ther Drug Carrier Syst. 1995;12(2-3):233-61; U.S. Pat. No. 5,567,434; U.S. Pat. No. 5,552,157; U.S. Pat. No. 5,565,213; U.S. Pat. No. 5,738,868 and U.S. Pat. No. 5,795,587, each specifically incorporated herein by reference in its entirety).

[1391] Liposomes have been used successfully with a number of cell types that are normally difficult to transfect by other procedures, including T cell suspensions, primary hepatocyte cultures and PC 12 cells (Renneisen et al., J Biol Chem. Sep. 25, 1990;265(27):16337-42; Muller et al., DNA Cell Biol. April 1990;9(3):221-9). In addition, liposomes are free of the DNA length constraints that are typical of viral-based delivery systems. Liposomes have been used effectively to introduce genes, various drugs, radiotherapeutic agents, enzymes, viruses, transcription factors, allosteric effectors and the like, into a variety of cultured cell lines and animals. Furthermore, he use of liposomes does not appear to be associated with autoimmune responses or unacceptable toxicity after systemic delivery.

[1392] In certain embodiments, liposomes are formed from phospholipids that are dispersed in an aqueous medium and spontaneously form multilamellar concentric bilayer vesicles (also termed multilamellar vesicles (MLVs).

[1393] Alternatively, in other embodiments, the invention provides for pharmaceutically-acceptable nanocapsule formulations of the compositions of the present invention. Nanocapsules can generally entrap compounds in a stable and reproducible way (see, for example, Quintanar-Guerrero et al., Drug Dev Ind Pharm. December 1998;24(12):1113-28). To avoid side effects due to intracellular polymeric overloading, such ultrafine particles (sized around 0.1 μm) may be designed using polymers able to be degraded in vivo. Such particles can be made as described, for example, by Couvreur et al., Crit Rev Ther Drug Carrier Syst. 1988;5(1):1-20; zur Muhlen et al., Eur J Pharm Biopharm. March 1998;45(2):149-55; Zambaux et al. J Controlled Release. Jan. 2, 1998;50(1-3):31-40; and U.S. Pat. No. 5,145,684.

[1394] Cancer Therapeutic Methods

[1395] Immunologic approaches to cancer therapy are based on the recognition that cancer cells can often evade the body's defenses against aberrant or foreign cells and molecules, and that these defenses might be therapeutically stimulated to regain the lost ground, e.g pgs. 623-648 in Klein, Immunology (Wiley-Interscience, New York, 1982). Numerous recent observations that various immune effectors can directly or indirectly inhibit growth of tumors has led to renewed interest in this approach to cancer therapy, e.g. Jager, et al., Oncology 2001;60(1):1-7; Renner, et al., Ann Hematol December 2000;79(12):651-9.

[1396] Four-basic cell types whose function has been associated with antitumor cell immunity and the elimination of tumor cells from the body are: i) B-lymphocytes which secrete immunoglobulins into the blood plasma for identifying and labeling the nonself invader cells; ii) monocytes which secrete the complement proteins that are responsible for lysing and processing the immunoglobulin-coated target invader cells; iii) natural killer lymphocytes having two mechanisms for the destruction of tumor cells, antibody-dependent cellular cytotoxicity and natural killing; and iv) T-lymphocytes possessing antigen-specific receptors and having the capacity to recognize a tumor cell carrying complementary marker molecules (Schreiber, H., 1989, in Fundamental Immunology (ed). W. E. Paul, pp. 923-955).

[1397] Cancer immunotherapy generally focuses on inducing humoral immune responses, cellular immune responses, or both. Moreover, it is well established that induction of CD4⁺ T helper cells is necessary in order to secondarily induce either antibodies or cytotoxic CD8⁺ T cells. Polypeptide antigens that are selective or ideally specific for cancer cells, particularly colon cancer cells, offer a powerful approach for inducing immune responses against colon cancer, and are an important aspect of the present invention.

[1398] Therefore, in further aspects of the present invention, the pharmaceutical compositions described herein may be used to stimulate an immune response against cancer, particularly for the immunotherapy of colon cancer. Within such methods, the pharmaceutical compositions described herein are administered to a patient, typically a warm-blooded animal, preferably a human. A patient may or may not be afflicted with cancer. Pharmaceutical compositions and vaccines may be administered either prior to or following surgical removal of primary tumors and/or treatment such as administration of radiotherapy or conventional chemotherapeutic drugs. As discussed above, administration of the pharmaceutical compositions may be by any suitable method, including administration by intravenous, intraperitoneal, intramuscular, subcutaneous, intranasal, intradermal, anal, vaginal, topical and oral routes.

[1399] Within certain embodiments, immunotherapy may be active immunotherapy, in which treatment relies on the in vivo stimulation of the endogenous host immune system to react against tumors with the administration of immune response-modifying agents (such as polypeptides and polynucleotides as provided herein).

[1400] Within other embodiments, immunotherapy may be passive immunotherapy, in which treatment involves the delivery of agents with established tumor-immune reactivity (such as effector cells or antibodies) that can directly or indirectly mediate antitumor effects and does not necessarily depend on an intact host immune system. Examples of effector cells include T cells as discussed above, T lymphocytes (such as CD8⁺ cytotoxic T lymphocytes and CD4⁺ T-helper tumor-infiltrating lymphocytes), killer cells (such as Natural Killer cells and lymphokine-activated killer cells), B cells and antigen-presenting cells (such as dendritic cells and macrophages) expressing a polypeptide provided herein. T cell receptors and antibody receptors specific for the polypeptides recited herein may be cloned, expressed and transferred into other vectors or effector cells for adoptive immunotherapy. The polypeptides provided herein may also be used to generate antibodies or anti-idiotypic antibodies (as described above and in U.S. Pat. No. 4,918,164) for passive immunotherapy.

[1401] Monoclonal antibodies may be labeled with any of a variety of labels for desired selective usages in detection, diagnostic assays or therapeutic applications (as described in U.S. Pat. Nos. 6,090,365; 6,015,542; 5,843,398; 5,595,721; and 4,708,930, hereby incorporated by reference in their entirety as if each was incorporated individually). In each case, the binding of the labelled monoclonal antibody to the determinant site of the antigen will signal detection or delivery of a particular therapeutic agent to the antigenic determinant on the non-normal cell. A further object of this invention is to provide the specific monoclonal antibody suitably labelled for achieving such desired selective usages thereof.

[1402] Effector cells may generally be obtained in sufficient quantities for adoptive immunotherapy by growth in vitro, as described herein. Culture conditions for expanding single antigen-specific effector cells to several billion in number with retention of antigen recognition in vivo are well known in the art. Such in vitro culture conditions typically use intermittent stimulation with antigen, often in the presence of cytokines (such as IL-2) and non-dividing feeder cells. As noted above, immunoreactive polypeptides as provided herein may be used to rapidly expand antigen-specific T cell cultures in order to generate a sufficient number of cells for immunotherapy. In particular, antigen-presenting cells, such as dendritic, macrophage, monocyte, fibroblast and/or B cells, may be pulsed with immunoreactive polypeptides or transfected with one or more polynucleotides using standard techniques well known in the art. For example, antigen-presenting cells can be transfected with a polynucleotide having a promoter appropriate for increasing expression in a recombinant virus or other expression system. Cultured effector cells for use in therapy must be able to grow and distribute widely, and to survive long term in vivo. Studies have shown that cultured effector cells can be induced to grow in vivo and to survive long term in substantial numbers by repeated stimulation with antigen supplemented with IL-2 (see, for example, Cheever et al., Immunological Reviews 157:177, 1997).

[1403] Alternatively, a vector expressing a polypeptide recited herein may be introduced into antigen presenting cells taken from a patient and clonally propagated ex vivo for transplant back into the same patient. Transfected cells may be reintroduced into the patient using any means known in the art, preferably in sterile form by intravenous, intracavitary, intraperitoneal or intratumor administration.

[1404] Routes and frequency of administration of the therapeutic compositions described herein, as well as dosage, will vary from individual to individual, and may be readily established using standard techniques. In general, the pharmaceutical compositions and vaccines may be administered by injection (e.g., intracutaneous, intramuscular, intravenous or subcutaneous), intranasally (e.g., by aspiration) or orally. Preferably, between 1 and 10 doses may be administered over a 52 week period. Preferably, 6 doses are administered, at intervals of 1 month, and booster vaccinations may be given periodically thereafter. Alternate protocols may be appropriate for individual patients. A suitable dose is an amount of a compound that, when administered as described above, is capable of promoting an anti-tumor immune response, and is at least 10-50% above the basal (i.e., untreated) level. Such response can be monitored by measuring the anti-tumor antibodies in a patient or by vaccine-dependent generation of cytolytic effector cells capable of killing the patient's tumor cells in vitro. Such vaccines should also be capable of causing an immune response that leads to an improved clinical outcome (e.g., more frequent remissions, complete or partial or longer disease-free survival) in vaccinated patients as compared to non-vaccinated patients. In general, for pharmaceutical compositions and vaccines comprising one or more polypeptides, the amount of each polypeptide present in a dose ranges from about 25 μg to 5 mg per kg of host. Suitable dose sizes will vary with the size of the patient, but will typically range from about 0.1 mL to about 5 mL.

[1405] In general, an appropriate dosage and treatment regimen provides the active compound(s) in an amount sufficient to provide therapeutic and/or prophylactic benefit. Such a response can be monitored by establishing an improved clinical outcome (e.g., more frequent remissions, complete or partial, or longer disease-free survival) in treated patients as compared to non-treated patients. Increases in preexisting immune responses to a tumor protein generally correlate with an improved clinical outcome. Such immune responses may generally be evaluated using standard proliferation, cytotoxicity or cytokine assays, which may be performed using samples obtained from a patient before and after treatment.

[1406] Cancer Detection and Diagnostic Compositions, Methods and Kits

[1407] In general, a cancer may be detected in a patient based on the presence of one or more colon tumor proteins and/or polynucleotides encoding such proteins in a biological sample (for example, blood, sera, sputum urine and/or tumor biopsies) obtained from the patient. In other words, such proteins may be used as markers to indicate the presence or absence of a cancer such as colon cancer. In addition, such proteins may be useful for the detection of other cancers. The binding agents provided herein generally permit detection of the level of antigen that binds to the agent in the biological sample.

[1408] Polynucleotide primers and probes may be used to detect the level of mRNA encoding a tumor protein, which is also indicative of the presence or absence of a cancer. In general, a tumor sequence should be present at a level that is at least two-fold, preferably three-fold, and more preferably five-fold or higher in tumor tissue than in normal tissue of the same type from which the tumor arose. Expression levels of a particular tumor sequence in tissue types different from that in which the tumor arose are irrelevant in certain diagnostic embodiments since the presence of tumor cells can be confirmed by observation of predetermined differential expression levels, e.g., 2-fold, 5-fold, etc, in tumor tissue to expression levels in normal tissue of the same type.

[1409] Other differential expression patterns can be utilized advantageously for diagnostic purposes. For example, in one aspect of the invention, overexpression of a tumor sequence in tumor tissue and normal tissue of the same type, but not in other normal tissue types, e.g. PBMCs, can be exploited diagnostically. In this case, the presence of metastatic tumor cells, for example in a sample taken from the circulation or some other tissue site different from that in which the tumor arose, can be identified and/or confirmed by detecting expression of the tumor sequence in the sample, for example using RT-PCR analysis. In many instances, it will be desired to enrich for tumor cells in the sample of interest, e.g., PBMCs, using cell capture or other like techniques.

[1410] There are a variety of assay formats known to those of ordinary skill in the art for using a binding agent to detect polypeptide markers in a sample. See, e.g., Harlow and Lane, Antibodies: A Laboratory Manual, Cold Spring Harbor Laboratory, 1988. In general, the presence or absence of a cancer in a patient may be determined by (a) contacting a biological sample obtained from a patient with a binding agent; (b) detecting in the sample a level of polypeptide that binds to the binding agent; and (c) comparing the level of polypeptide with a predetermined cut-off value.

[1411] In a preferred embodiment, the assay involves the use of binding agent immobilized on a solid support to bind to and remove the polypeptide from the remainder of the sample. The bound polypeptide may then be detected using a detection reagent that contains a reporter group and specifically binds to the binding agent/polypeptide complex. Such detection reagents may comprise, for example, a binding agent that specifically binds to the polypeptide or an antibody or other agent that specifically binds to the binding agent, such as an anti-immunoglobulin, protein G, protein A or a lectin. Alternatively, a competitive assay may be utilized, in which a polypeptide is labeled with a reporter group and allowed to bind to the immobilized binding agent after incubation of the binding agent with the sample. The extent to which components of the sample inhibit the binding of the labeled polypeptide to the binding agent is indicative of the reactivity of the sample with the immobilized binding agent. Suitable polypeptides for use within such assays include full length colon tumor proteins and polypeptide portions thereof to which the binding agent binds, as described above.

[1412] The solid support may be any material known to those of ordinary skill in the art to which the tumor protein may be attached. For example, the solid support may be a test well in a microtiter plate or a nitrocellulose or other suitable membrane. Alternatively, the support may be a bead or disc, such as glass, fiberglass, latex or a plastic material such as polystyrene or polyvinylchloride. The support may also be a magnetic particle or a fiber optic sensor, such as those disclosed, for example, in U.S. Pat. No. 5,359,681. The binding agent may be immobilized on the solid support using a variety of techniques known to those of skill in the art, which are amply described in the patent and scientific literature. In the context of the present invention, the term “immobilization” refers to both noncovalent association, such as adsorption, and covalent attachment (which may be a direct linkage between the agent and functional groups on the support or may be a linkage by way of a cross-linking agent). Immobilization by adsorption to a well in a microtiter plate or to a membrane is preferred. In such cases, adsorption may be achieved by contacting the binding agent, in a suitable buffer, with the solid support for a suitable amount of time. The contact time varies with temperature, but is typically between about 1 hour and about 1 day. In general, contacting a well of a plastic microtiter plate (such as polystyrene or polyvinylchloride) with an amount of binding agent ranging from about 10 ng to about 10 μg, and preferably about 100 ng to about 1 μg, is sufficient to immobilize an adequate amount of binding agent.

[1413] Covalent attachment of binding agent to a solid support may generally be achieved by first reacting the support with a bifunctional reagent that will react with both the support and a functional group, such as a hydroxyl or amino group, on the binding agent. For example, the binding agent may be covalently attached to supports having an appropriate polymer coating using benzoquinone or by condensation of an aldehyde group on the support with an amine and an active hydrogen on the binding partner (see, e.g., Pierce Immunotechnology Catalog and Handbook, 1991, at A12-A13).

[1414] In certain embodiments, the assay is a two-antibody sandwich assay. This assay may be performed by first contacting an antibody that has been immobilized on a solid support, commonly the well of a microtiter plate, with the sample, such that polypeptides within the sample are allowed to bind to the immobilized antibody. Unbound sample is then removed from the immobilized polypeptide-antibody complexes and a detection reagent (preferably a second antibody capable of binding to a different site on the polypeptide) containing a reporter group is added. The amount of detection reagent that remains bound to the solid support is then determined using a method appropriate for the specific reporter group.

[1415] More specifically, once the antibody is immobilized on the support as described above, the remaining protein binding sites on the support are typically blocked. Any suitable blocking agent known to those of ordinary skill in the art, such as bovine serum albumin or Tween 20™ (Sigma Chemical Co., St. Louis, Mo.). The immobilized antibody is then incubated with the sample, and polypeptide is allowed to bind to the antibody. The sample may be diluted with a suitable diluent, such as phosphate-buffered saline (PBS) prior to incubation. In general, an appropriate contact time (i.e., incubation time) is a period of time that is sufficient to detect the presence of polypeptide within a sample obtained from an individual with colon cancer at least about 95% of that achieved at equilibrium between bound and unbound polypeptide. Those of ordinary skill in the art will recognize that the time necessary to achieve equilibrium may be readily determined by assaying the level of binding that occurs over a period of time. At room temperature, an incubation time of about 30 minutes is generally sufficient.

[1416] Unbound sample may then be removed by washing the solid support with an appropriate buffer, such as PBS containing 0.1% Tween 20™. The second antibody, which contains a reporter group, may then be added to the solid support. Preferred reporter groups include those groups recited above.

[1417] The detection reagent is then incubated with the immobilized antibody-polypeptide complex for an amount of time sufficient to detect the bound polypeptide. An appropriate amount of time may generally be determined by assaying the level of binding that occurs over a period of time. Unbound detection reagent is then removed and bound detection reagent is detected using the reporter group. The method employed for detecting the reporter group depends upon the nature of the reporter group. For radioactive groups, scintillation counting or autoradiographic methods are generally appropriate. Spectroscopic methods may be used to detect dyes, luminescent groups and fluorescent groups. Biotin may be detected using avidin, coupled to a different reporter group (commonly a radioactive or fluorescent group or an enzyme). Enzyme reporter groups may generally be detected by the addition of substrate (generally for a specific period of time), followed by spectroscopic or other analysis of the reaction products.

[1418] To determine the presence or absence of a cancer, such as colon cancer, the signal detected from the reporter group that remains bound to the solid support is generally compared to a signal that corresponds to a predetermined cut-off value. In one preferred embodiment, the cut-off value for the detection of a cancer is the average mean signal obtained when the immobilized antibody is incubated with samples from patients without the cancer. In general, a sample generating a signal that is three standard deviations above the predetermined cut-off value is considered positive for the cancer. In an alternate preferred embodiment, the cut-off value is determined using a Receiver Operator Curve, according to the method of Sackett et al., Clinical Epidemiology: A Basic Science for Clinical Medicine, Little Brown and Co., 1985, p. 106-7. Briefly, in this embodiment, the cut-off value may be determined from a plot of pairs of true positive rates (i.e., sensitivity) and false positive rates (100%-specificity) that correspond to each possible cut-off value for the diagnostic test result. The cut-off value on the plot that is the closest to the upper left-hand corner (i.e., the value that encloses the largest area) is the most accurate cut-off value, and a sample generating a signal that is higher than the cut-off value determined by this method may be considered positive. Alternatively, the cut-off value may be shifted to the left along the plot, to minimize the false positive rate, or to the right, to minimize the false negative rate. In general, a sample generating a signal that is higher than the cut-off value determined by this method is considered positive for a cancer.

[1419] In a related embodiment, the assay is performed in a flow-through or strip test format, wherein the binding agent is immobilized on a membrane, such as nitrocellulose. In the flow-through test, polypeptides within the sample bind to the immobilized binding agent as the sample passes through the membrane. A second, labeled binding agent then binds to the binding agent-polypeptide complex as a solution containing the second binding agent flows through the membrane. The detection of bound second binding agent may then be performed as described above. In the strip test format, one end of the membrane to which binding agent is bound is immersed in a solution containing the sample. The sample migrates along the membrane through a region containing second binding agent and to the area of immobilized binding agent. Concentration of second binding agent at the area of immobilized antibody indicates the presence of a cancer. Typically, the concentration of second binding agent at that site generates a pattern, such as a line, that can be read visually. The absence of such a pattern indicates a negative result. In general, the amount of binding agent immobilized on the membrane is selected to generate a visually discernible pattern when the biological sample contains a level of polypeptide that would be sufficient to generate a positive signal in the two-antibody sandwich assay, in the format discussed above. Preferred binding agents for use in such assays are antibodies and antigen-binding fragments thereof. Preferably, the amount of antibody immobilized on the membrane ranges from about 25 ng to about 1 μg, and more preferably from about 50 ng to about 500 ng. Such tests can typically be performed with a very small amount of biological sample.

[1420] Of course, numerous other assay protocols exist that are suitable for use with the tumor proteins or binding agents of the present invention. The above descriptions are intended to be exemplary only. For example, it will be apparent to those of ordinary skill in the art that the above protocols may be readily modified to use tumor polypeptides to detect antibodies that bind to such polypeptides in a biological sample. The detection of such tumor protein specific antibodies may correlate with the presence of a cancer.

[1421] A cancer may also, or alternatively, be detected based on the presence of T cells that specifically react with a tumor protein in a biological sample. Within certain methods, a biological sample comprising CD4⁺ and/or CD8⁺ T cells isolated from a patient is incubated with a tumor polypeptide, a polynucleotide encoding such a polypeptide and/or an APC that expresses at least an immunogenic portion of such a polypeptide, and the presence or absence of specific activation of the T cells is detected. Suitable biological samples include, but are not limited to, isolated T cells. For example, T cells may be isolated from a patient by routine techniques (such as by Ficoll/Hypaque density gradient centrifugation of peripheral blood lymphocytes). T cells may be incubated in vitro for 2-9 days (typically 4 days) at 37° C. with polypeptide (e.g., 5-25 μg/ml). It may be desirable to incubate another aliquot of a T cell sample in the absence of tumor polypeptide to serve as a control. For CD4⁺ T cells, activation is preferably detected by evaluating proliferation of the T cells. For CD8⁺ T cells, activation is preferably detected by evaluating cytolytic activity. A level of proliferation that is at least two fold greater and/or a level of cytolytic activity that is at least 20% greater than in disease-free patients indicates the presence of a cancer in the patient.

[1422] As noted above, a cancer may also, or alternatively, be detected based on the level of mRNA encoding a tumor protein in a biological sample. For example, at least two oligonucleotide primers may be employed in a polymerase chain reaction (PCR) based assay to amplify a portion of a tumor cDNA derived from a biological sample, wherein at least one of the oligonucleotide primers is specific for (i.e., hybridizes to) a polynucleotide encoding the tumor protein. The amplified cDNA is then separated and detected using techniques well known in the art, such as gel electrophoresis.

[1423] Similarly, oligonucleotide probes that specifically hybridize to a polynucleotide encoding a tumor protein may be used in a hybridization assay to detect the presence of polynucleotide encoding the tumor protein in a biological sample.

[1424] To permit hybridization under assay conditions, oligonucleotide primers and probes should comprise an oligonucleotide sequence that has at least about 60%, preferably at least about 75% and more preferably at least about 90%, identity to a portion of a polynucleotide encoding a tumor protein of the invention that is at least 10 nucleotides, and preferably at least 20 nucleotides, in length. Preferably, oligonucleotide primers and/or probes hybridize to a polynucleotide encoding a polypeptide described herein under moderately stringent conditions, as defined above. Oligonucleotide primers and/or probes which may be usefully employed in the diagnostic methods described herein preferably are at least 10-40 nucleotides in length. In a preferred embodiment, the oligonucleotide primers comprise at least 10 contiguous nucleotides, more preferably at least 15 contiguous nucleotides, of a DNA molecule having a sequence as disclosed herein. Techniques for both PCR based assays and hybridization assays are well known in the art (see, for example, Mullis et al., Cold Spring Harbor Symp. Quant. Biol., 51:263, 1987; Erlich ed., PCR Technology, Stockton Press, NY, 1989).

[1425] One preferred assay employs RT-PCR, in which PCR is applied in conjunction with reverse transcription. Typically, RNA is extracted from a biological sample, such as biopsy tissue, and is reverse transcribed to produce cDNA molecules. PCR amplification using at least one specific primer generates a cDNA molecule, which may be separated and visualized using, for example, gel electrophoresis. Amplification may be performed on biological samples taken from a test patient and from an individual who is not afflicted with a cancer. The amplification reaction may be performed on several dilutions of cDNA spanning two orders of magnitude. A two-fold or greater increase in expression in several dilutions of the test patient sample as compared to the same dilutions of the non-cancerous sample is typically considered positive.

[1426] In another aspect of the present invention, cell capture technologies may be used in conjunction, with, for example, real-time PCR to provide a more sensitive tool for detection of metastatic cells expressing colon tumor antigens. Detection of colon cancer cells in biological samples, e.g., bone marrow samples, peripheral blood, and small needle aspiration samples is desirable for diagnosis and prognosis in colon cancer patients.

[1427] Immunomagnetic beads coated with specific monoclonal antibodies to surface cell markers, or tetrameric antibody complexes, may be used to first enrich or positively select cancer cells in a sample. Various commercially available kits may be used, including Dynabeads® Epithelial Enrich (Dynal Biotech, Oslo, Norway), StemSep™ (StemCell Technologies, Inc., Vancouver, BC), and RosetteSep (StemCell Technologies). A skilled artisan will recognize that other methodologies and kits may also be used to enrich or positively select desired cell populations. Dynabeads® Epithelial Enrich contains magnetic beads coated with mAbs specific for two glycoprotein membrane antigens expressed on normal and neoplastic epithelial tissues. The coated beads may be added to a sample and the sample then applied to a magnet, thereby capturing the cells bound to the beads. The unwanted cells are washed away and the magnetically isolated cells eluted from the beads and used in further analyses.

[1428] RosetteSep can be used to enrich cells directly from a blood sample and consists of a cocktail of tetrameric antibodies that targets a variety of unwanted cells and crosslinks them to glycophorin A on red blood cells (RBC) present in the sample, forming rosettes. When centrifuged over Ficoll, targeted cells pellet along with the free RBC. The combination of antibodies in the depletion cocktail determines which cells will be removed and consequently which cells will be recovered. Antibodies that are available include, but are not limited to: CD2, CD3, CD4, CD5, CD8, CD10, CD11b, CD14, CD15, CD16, CD19, CD20, CD24, CD25, CD29, CD33, CD34, CD36, CD38, CD41, CD45, CD45RA, CD45RO, CD56, CD66B, CD66e, HLA-DR, IgE, and TCRαβ:.

[1429] Additionally, it is contemplated in the present invention that mAbs specific for colon tumor antigens can be generated and used in a similar manner. For example, mAbs that bind to tumor-specific cell surface antigens may be conjugated to magnetic beads, or formulated in a tetrameric antibody complex, and used to enrich or positively select metastatic colon tumor cells from a sample. Once a sample is enriched or positively selected, cells may be lysed and RNA isolated. RNA may then be subjected to RT-PCR analysis using colon tumor-specific primers in a real-time PCR assay as described herein. One skilled in the art will recognize that enriched or selected populations of cells may be analyzed by other methods (e.g. in situ hybridization or flow cytometry).

[1430] In another embodiment, the compositions described herein may be used as markers for the progression of cancer. In this embodiment, assays as described above for the diagnosis of a cancer may be performed over time, and the change in the level of reactive polypeptide(s) or polynucleotide(s) evaluated. For example, the assays may be performed every 24-72 hours for a period of 6 months to 1 year, and thereafter performed as needed. In general, a cancer is progressing in those patients in whom the level of polypeptide or polynucleotide detected increases over time. In contrast, the cancer is not progressing when the level of reactive polypeptide or polynucleotide either remains constant or decreases with time.

[1431] Certain in vivo diagnostic assays may be performed directly on a tumor. One such assay involves contacting tumor cells with a binding agent. The bound binding agent may then be detected directly or indirectly via a reporter group. Such binding agents may also be used in histological applications. Alternatively, polynucleotide probes may be used within such applications.

[1432] As noted above, to improve sensitivity, multiple tumor protein markers may be assayed within a given sample. It will be apparent that binding agents specific for different proteins provided herein may be combined within a single assay. Further, multiple primers or probes may be used concurrently. The selection of tumor protein markers may be based on routine experiments to determine combinations that results in optimal sensitivity. In addition, or alternatively, assays for tumor proteins provided herein may be combined with assays for other known tumor antigens.

[1433] The present invention further provides kits for use within any of the above diagnostic methods. Such kits typically comprise two or more components necessary for performing a diagnostic assay. Components may be compounds, reagents, containers and/or equipment. For example, one container within a kit may contain a monoclonal antibody or fragment thereof that specifically binds to a tumor protein. Such antibodies or fragments may be provided attached to a support material, as described above. One or more additional containers may enclose elements, such as reagents or buffers, to be used in the assay. Such kits may also, or alternatively, contain a detection reagent as described above that contains a reporter group suitable for direct or indirect detection of antibody binding.

[1434] Alternatively, a kit may be designed to detect the level of mRNA encoding a tumor protein in a biological sample. Such kits generally comprise at least one oligonucleotide probe or primer, as described above, that hybridizes to a polynucleotide encoding a tumor protein. Such an oligonucleotide may be used, for example, within a PCR or hybridization assay. Additional components that may be present within such kits include a second oligonucleotide and/or a diagnostic reagent or container to facilitate the detection of a polynucleotide encoding a tumor protein.

[1435] The following Examples are offered by way of illustration and not limitation.

### EXAMPLES

### Example 1

[1436] Identification of Duke's Stage D, Grade II Primary Colon Tumor Protein cDNAs from a PCR-based Subtraction Library

[1437] This Example illustrates the identification of cDNA molecules encoding colon tumor proteins from a PCR-based subtraction library.

[1438] Fifty six individual clones were characterized by DNA sequencing, all representing cDNA fragments from Duke's Stage D, Grade II primary colon tumors subtracted with normal tissues including lymph node, PBMC, small intestine, stomach, pancreas, lung, brain, heart, and normal colon. This subtraction, based on a PCR-based subtraction protocol developed by Clontech (Palo Alto, Calif.), generated a library representing genes that are over-expressed or exclusively expressed in Duke's Stage D and Grade II colon tumor tissue.

[1439] Briefly, the cDNA library was constructed and cloned into the PCR2.1 vector (Invitrogen, Carlsbad, Calif.) by subtracting a pool of one or more tumors with a pool of normal tissues, for example, colon, spleen, brain, liver, kidney, lung, stomach and small intestine, using PCR subtraction methodologies (Clontech, Palo Alto, Calif.). The subtraction was performed using a PCR-based protocol, which was modified to generate larger fragments. Within this protocol, tester and driver double stranded cDNA were separately digested with five restriction enzymes that recognize six-nucleotide restriction sites (MluI, MscI, PvuII, SalI and StuI). This digestion results in an average cDNA size of 600 bp, rather than the average size of 300 bp that results from digestion with RsaI according to the Clontech protocol. This modification does not affect the subtraction efficiency. Two tester populations were then created with different adapters, such that the driver library remained without adapters.

[1440] The tester and driver libraries were then hybridized using excess driver cDNA. In the first hybridization step, driver was separately hybridized with each of the two tester cDNA populations. This resulted in populations of (a) unhybridized tester cDNAs, (b) tester cDNAs hybridized to other tester cDNAs, (c) tester cDNAs hybridized to driver cDNAs, and (d) unhybridized driver cDNAs. The two separate hybridization reactions were then combined, and rehybridized in the presence of additional denatured driver cDNA. Following this second hybridization, in addition to populations (a) through (d), a fifth population (e) was generated in which tester cDNA with one adapter hybridized to tester cDNA with the second adapter. Accordingly, the second hybridization step results in enrichment of differentially expressed sequences which can be used as templates for PCR amplification with adaptor-specific primers.

[1441] The ends were then filled in, and PCR amplification was performed using adaptor-specific primers. Only population (e), which contained tester cDNA that did not hybridize to driver cDNA, was amplified exponentially. A second PCR amplification step was then performed, to reduce background and further enrich differentially expressed sequences.

[1442] This PCR-based subtraction technique normalizes differentially expressed cDNA so that rare transcripts that were over-expressed in colon tumor tissue may be recoverable. Such transcripts would be difficult to recover by traditional subtraction methods.

[1443] The cDNAs isolated were searched against public databases including Genbank and those showing some degree of similarity with known sequences in the database shown in Table 2. Several cDNAs were isolated from this subtracted library that showed no significant similarity to known sequences. These are listed in Table 3.

TABLE 2
GENBANK SEARCH RESULTS FOR cDNA MOLECULES
ENCODING DUKE'S D, GRADE II COLON TUMOR PROTEINS

| SEQ ID | Clone | |
|---|---|---|
| NO: | Identifier | Genbank Search Results |
| 1 | 66211 | Eukaryotic translation initiation factor 3 |
| 2 | 66179 | Neural polypyrimidine tract binding protein |
| 3 | 66191 | Runt-related transcription factor 3 |
| 4 | 66192 | CEA |
| 5 | 66143 | Human ribophorin II |
| 6 | 66214 | Mitochondria genome |
| 7 | 66203 | Histamine N-methyltransferase |
| 8 | 66174 | Human cyclin G1 |
| 9 | 66170 | Nuclear cap binding protein subunit 1 |
| 10 | 66160 | Suppressor of G2 allele of SKP1 |
| 11 | 66190 | pre-mRNA splicing factor |
| 12 | 66171 | Human cadherin |
| 13 | 66209 | Human rac1 gene |
| 14 | 66137 | Human phosphoserine phosphatase-like |
| 15 | 66187 | CD164 antigen, sialomucin |
| 16 | 66208 | Histone acetyltransferase 1 |
| 17 | 66181 | Death effector domain-containing protein |
| | | DEDPRO1 |
| 18 | 66145 | CEA |
| 19 | 66197 | Human pro-alpha 2(I) collagen (COL1A2) gene |
| 20 | 66204 | Human lipocalin 2 |
| 21 | 66184 | Human transmembrane trafficking protein (TMP21) |
| 22 | 66133 | Chloride channel, calcium activated 1 |
| 23 | 66182 | Human gastrointestinal peptide (PEC-60) |
| 24 | 66141 | Human mitochondrion |
| 25 | 66220 | Human proteasome subunit p112 |
| 26 | 66161 | Human tumor-associated calcium signal transducer 1 |
| 27 | 66223 | Human COP9 complex subunit 4 |
| 28 | 66205 | Keratin 19 |
| 29 | 66225 | Human SUI1 isolog |
| 30 | 66177 | Human gene for ATP synthase gamma-subunit |
| 31 | 66152 | Human mitochondrial genome |
| 32 | 66176 | Human ribosomal protein L41 |
| 33 | 66154 | Human nonspecific crossreacting antigen |
| 34 | 66219 | Human hepatocellular carcinoma associated-gene |
| | | TB6 |
| 35 | 66224 | Human actin binding protein anillin |
| 36 | 66222 | Human nonspecific crossreacting antigen |
| 37 | 66169 | cDNA FLJ21386fis, clone COL03414 |
| 38 | 66172 | Sequence from clone RP1-12G14 |
| 39 | 66149 | Chromosome 17, clone hRPK.63_A_1 |
| 40 | 66164 | KIAA0451 |
| 41 | 66213 | Chromosome 11p14.3 PAC clone pDJ239b22 |
| 42 | 66188 | Patent WO9954461 |
| 43 | 66158 | cDNAFLJ13772 fis, clone PLACE4000300 |
| 44 | 66195 | Human clone HQ0229 |
| 45 | 66155 | Clone 2067c2t7 map 13qtel sequence |
| 46 | 66138 | Patent WO9954461 |
| 47 | 66201 | BAC clone CTA-356E1 from 7q11.23-q21.1 |
| 48 | 66221 | Human chromosome 5 clone CTB-94B10 |
| 49 | 66196 | KIAA1038 |

[1444] TABLE 3
cDNA MOLECULES ENCODING DUKE'S D, GRADE II
COLON TUMOR PROTEINS SHOWING NO SIGNIFICANT
SIMILARITY TO KNOWN SEQUENCES

| SEQ ID | Clone |
|---|---|
| NO: | Identifier |
| 50 | 66140 |
| 51 | 66199 |
| 52 | 66157 |
| 53 | 66132 |
| 54 | 66159 |
| 55 | 66150 |
| 56 | 66217 |

### Example 2

[1445] Identification of Duke's B Colon Tumor Protein cDNAs from A Biotin-streptavidin-based Subtraction Library

[1446] This Example illustrates the identification of cDNA molecules encoding colon tumor proteins from a biotin-streptavidin-based subtraction library.

[1447] The colon tumor Duke's B subtraction 9 (CTBS9) library was generated using a traditional biotin-streptavidin subtraction protocol as follows:

[1448] Tester: 12 μg Colon Tumor Duke's B Library in pZErO™-2 (754-17)

[1449] Driver: 25 μg Normal Colon in pZErO™-2.

[1450] 25 μg Liver and Salivary Gland in pZErO™-2

[1451] 50 μg Pooled Driver in pZErO™-2 (liver, pancreas, skin, bone marrow, resting PBMC, stomach, whole brain)

[1452] Briefly, the tester was cut with BamH I and Xho I while all drivers were cut with EcoR I, Not I, and Nco I. One overnight hybridization of tester and driver was performed at 68° C. and followed by the first biotin-streptavidin subtraction. Another 2-hour hybridization at 68° C. was followed by a second subtraction. cDNA remaining after the two subtractions was ligated into pCR2.1-TOPO, electroporated into ElectroMAX DH10B cells, and grown on agar plates containing ampicillin. This library represents genes that are over-expressed or exclusively expressed in Duke's B colon tumor tissue. The 89 individual sequences and 11 contig consensus sequences disclosed here represent clones that were randomly selected for amplification by polymerase chain reaction (PCR). Clones amplified by PCR were characterized by sequencing and the resulting sequence searched against public databases. Those cDNAs showing some degree of similarity with known sequences in the database are described in Table 4. Several cDNAs isolated from this subtracted library showed no significant similarity with any known sequences in the database. These are listed in Table 5. Multiple sequences from Tables 4 and 5 align to form 11 different consensus (contig) sequences, described in Table 6.

TABLE 4
GENBANK SEARCH RESULTS FOR cDNA MOLECULES
ENCODING DUKE'S B COLON TUMOR PROTEINS

| SEQ ID | Clone | Present in | |
|---|---|---|---|
| NO: | Identifier | Contig # | Genbank Search Results |
| 57 | 65685 | | Homo sapiens myosin, heavy polypeptide-like |
| | | | (110kD) (MYHL) mRNA |
| 58 | 65686 | 7 | Human mitochondrion, complete genome |
| 59 | 65687 | | Human DNA sequence from clone RP5-881L22 |
| | | | on chromosome 20 (bp 51-186) & Homo sapiens |
| | | | hepatocyte nuclear factor 4, alpha (HNF4A) |
| | | | mRNA (bp 186-292) |
| 62 | 65692 | 44 | Homo sapiens PEG1/MEST mRNA, complete |
| | | | cds |
| 63 | 65695 | 18 | Homo sapiens cDNA: FLJ23156 fis, clone |
| | | | LNG09609 |
| 64 | 65696 | | Homo sapiens cDNA: FLJ21933 fis, clone |
| | | | HEP04337 |
| 65 | 65698 | | H. sapiens mRNA for ATL-derived |
| | | | factor/thiredoxin |
| 66 | 65700 | 43 | Homo sapiens guanine nucleotide binding protein |
| | | | (G protein), betapolypeptide 2-like 1 (GNB2L1), |
| | | | mRNA |
| 68 | 65703 | 33 | Homo sapiens putative G protein-coupled |
| | | | receptor (GPCR150), mRNA |
| 69 | 65705 | 43 | Homo sapiens guanine nucleotide binding protein |
| | | | (G protein), betapolypeptide 2-like 1 (GNB2L1), |
| | | | mRNA |
| 70 | 65713 | 8 | Homo sapiens ribosomal protein L10 (RPL10), |
| | | | mRNA |
| 71 | 65714 | | Homo sapiens solute carrier family 1 (neutral |
| | | | amino acidtransporter), member 5 (SLC1A5) |
| | | | mRNA |
| 72 | 65715 | | Human mRNA for glutathione-insulin |
| | | | transhydrogenase (EC 5.3.4.1/1.8.4.2) |
| 73 | 65718 | 43 | Homo sapiens guanine nucleotide binding protein |
| | | | (G protein), betapolypeptide 2-like 1 (GNB2L1), |
| | | | mRNA |
| 74 | 65720 | 19 | Human mRNA for pro-alpha-1 type 3 collagen |
| 75 | 65722 | | Homo sapiens mRNA for KIAA0356 protein, |
| | | | partial cds |
| 76 | 65726 | 22 | Human nonspecific crossreacting antigen mRNA, |
| | | | complete cds |
| 77 | 65727 | | Homo sapiens full length insert cDNA clone |
| | | | YI64E10 |
| 78 | 65728 | | Homo sapiens targeting protein for Xklp2 |
| | | | (TPX2) mRNA, partial cds |
| 79 | 65729 | | Human mitochondrion, complete genome |
| 81 | 65731 | | Homo sapiens mRNA for KIAA1101 protein, |
| | | | complete cds |
| 82 | 65733 | 7 | Human mitochondrion, complete genome |
| 83 | 65734 | 5 | Human mitochondrion, complete genome |
| 84 | 65736 | | Homo sapiens acetyl-Coenzyme A transporter |
| | | | (ACATN), mRNA |
| 85 | 65739 | | Homo sapiens hydroxyacyl-Coenzyme A |
| | | | dehydrogenase/3-ketoacyl-CoenzymeA |
| | | | thiolase/enoyl-Coenzyme A hydratase |
| | | | (trifunctionalprotein), beta subunit (HADHB) |
| | | | mRNA |
| 86 | 65741 | 43 | Homo sapiens guanine nucleotide binding protein |
| | | | (G protein), betapolypeptide 2-like 1 (GNB2L1), |
| | | | mRNA |
| 87 | 65742 | 19 | Human mRNA for pro-alpha-1 type 3 collagen |
| 88 | 65745 | | Homo sapiens alanyl-tRNA synthetase (AARS) |
| | | | mRNA |
| 89 | 65747 | 9 | Human mitochondrion, complete genome |
| 90 | 65749 | | Homo sapiens mRNA for FLJ00085 protein, |
| | | | partial cds |
| 91 | 65751 | 43 | Homo sapiens guanine nucleotide binding protein |
| | | | (G protein), betapolypeptide 2-like 1 (GNB2L1), |
| | | | mRNA |
| 92 | 65752 | | Homo sapiens guanine nucleotide binding protein |
| | | | (G protein), betapolypeptide 2-like 1 (GNB2L1), |
| | | | mRNA |
| 93 | 65753 | | Homo sapiens cDNA: FLJ22454 fis, clone |
| | | | HRC09703 |
| 94 | 65757 | | Homo sapiens Chromosome 11q13 BAC Clone |
| | | | 18h3, complete sequence |
| 95 | 65760 | | Human carcinoembryonic antigen mRNA (CEA), |
| | | | complete cds |
| 97 | 65762 | | Homo sapiens ribosomal protein S2 (RPS2) |
| | | | mRNA |
| 98 | 65764 | 43 | Homo sapiens guanine nucleotide binding protein |
| | | | (G protein), betapolypeptide 2-like 1 (GNB2L1), |
| | | | mRNA |
| 99 | 65767 | | Homo sapiens hypothetical protein FLJ20315 |
| | | | (FLJ20315), mRNA |
| 100 | 66303 | 22 | Human nonspecific crossreacting antigen mRNA, |
| | | | complete cds |
| 101 | 66306 | 5 | Human mitochondrion, complete genome |
| 102 | 66308 | 8 | Homo sapiens ribosomal protein L10 (RPL10), |
| | | | mRNA |
| 104 | 66310 | | Homo sapiens chondroitin sulfate proteoglycan 2 |
| | | | (versican) (CSPG2), mRNA |
| 105 | 66315 | 22 | Human nonspecific crossreacting antigen mRNA, |
| | | | complete cds |
| 106 | 66316 | 44 | Homo sapiens PEG1/MEST mRNA, complete |
| | | | cds |
| 107 | 66317 | | Homo sapiens claudin 4 (CLDN4), mRNA |
| 108 | 66319 | | Human ADP/ATP translocase mRNA, 3′ end, |
| | | | clone pHAT3 |
| 109 | 66320 | | integrin alpha 6B [human, mRNA Partial, 528 nt] |
| 110 | 66324 | 5 | Human mitochondrion, complete genome |
| 111 | 66327 | | Human mRNA for KIAA0182 gene, partial cds |
| 112 | 66328 | 22 | Human nonspecific crossreacting antigen mRNA, |
| | | | complete cds |
| 113 | 66331 | | Human lumican mRNA, complete cds |
| 114 | 66332 | | Human beta-thromboglobulin-like protein |
| | | | mRNA, complete cds |
| 116 | 66337 | | Homo sapiens vascular endothelial growth factor |
| | | | (VEGF) mRNA, 3′UTR |
| 117 | 66338 | 19 | Human mRNA for pro-alpha-1 type 3 collagen |
| 118 | 66339 | | Homo sapiens mRNA; cDNA DKFZp434P155 |
| | | | (from clone DKFZp434P155) |
| 119 | 66340 | | Homo sapiens HRS gene, partial cds |
| 120 | 66341 | | Homo sapiens chromosome 16 clone RPCI- |
| | | | 11_67I13, complete sequence |
| 121 | 66343 | | Human DNA sequence from clone RP5-862P8 on |
| | | | chromosome 1q42.2-43, complete sequence |
| 122 | 66345 | | Homo sapiens mRNA; cDNA DKFZp564L176 |
| | | | (from clone DKFZp564L176) |
| 123 | 66346 | 43 | Homo sapiens guanine nucleotide binding protein |
| | | | (G protein), betapolypeptide 2-like 1 (GNB2L1), |
| | | | mRNA |
| 124 | 66347 | 18 | Homo sapiens cDNA: FLJ23156 fis, clone |
| | | | LNG09609 |
| 125 | 66348 | | Homo sapiens cDNA: FLJ21569 fis, clone |
| | | | COL06508 |
| 126 | 66354 | | Homo sapiens cDNA: FLJ21427 fis, clone |
| | | | COL04177 |
| 127 | 66356 | 43 | Homo sapiens guanine nucleotide binding protein |
| | | | (G protein), betapolypeptide 2-like 1 (GNB2L1), |
| | | | mRNA |
| 128 | 66357 | 21 | Homo sapiens SFRS protein kinase 1 (SRPK1), |
| | | | mRNA |
| 129 | 66358 | | Homo sapiens mRNA for KIAA1430 protein, |
| | | | partial cds |
| 130 | 66359 | 9 | Human mitochondrion, complete genome |
| 131 | 66360 | | Homo sapiens clone PP1446 unknown mRNA |
| 132 | 66362 | | Homo sapiens API5-like 1 (API5L1), mRNA |
| 133 | 66368 | | Homo sapiens hypothetical protein FLJ20274 |
| | | | (FLJ20274), mRNA |
| 135 | 66370 | | Homo sapiens carcinoembryonic antigen-related |
| | | | cell adhesion molecule7 (CEACAM7), mRNA |
| 136 | 66373 | | Homo sapiens serine/threonine protein |
| | | | phosphatase catalytic subunit (LOC51723), |
| | | | mRNA |
| 137 | 66376 | 43 | Homo sapiens guanine nucleotide binding protein |
| | | | (G protein), betapolypeptide 2-like 1 (GNB2L1), |
| | | | mRNA |
| 138 | 66377 | | Human DNA sequence from clone RP11-131A5 |
| | | | on chromosome 9q22.1-22.33, complete |
| | | | sequence |
| 139 | 66378 | | Homo sapiens mRNA for KIAA0746 protein, |
| | | | partial cds |
| 140 | 66380 | | H. sapiens mRNA for fibrillin |
| 141 | 66384 | | Human ribosomal protein L23a mRNA, complete |
| | | | cds |
| 142 | 66386 | | Homo sapiens cDNA FLJ13630 fis, clone |
| | | | PLACE1011057 |
| 143 | 66392 | 33 | Homo sapiens putative G protein-coupled |
| | | | receptor (GPCR150), mRNA |
| 144 | 66393 | 21 | Homo sapiens SFRS protein kinase 1 (SRPK1), |
| | | | mRNA |
| 145 | 66395 | 19 | Human mRNA for pro-alpha-1 type 3 collagen |

[1453] TABLE 5
cDNA MOLECULES ENCODING DUKE'S B COLON TUMOR
PROTEINS SHOWING NO SIGNIFICANT SIMILARITY WITH
ANY KNOWN SEQUENCES

| SEQ ID | Clone | Present in | |
|---|---|---|---|
| NO: | Identifier | Contig # | Genbank Search Results |
| 60 | 65688 | | may be related to Mus musculus |
| | | | complement component 1, q subcompo- |
| | | | nent, c polypeptide (C1qc), mRNA |
| 61 | 65690 | | |
| 67 | 65701 | | |
| 80 | 65730 | | |
| 96 | 65761 | | |
| 103 | 66309 | | |
| 115 | 66335 | | |
| 134 | 66369 | | |

[1454] TABLE 6
MULTIPLE SEQUENCES FROM CTBS9 ALIGN TO FORM 11 CONTIGS

| SEQ | | |
|---|---|---|
| ID NO: | Clone Identifier | Genbank Search Results |
| 146 | CTBS9contig.5 | Human mitochondrion, complete genome |
| 147 | CTBS9contig.7 | Human mitochondrion, complete genome |
| 148 | CTBS9contig.8 | Homo sapiens ribosomal protein L10 (RPL10), mRNA |
| 149 | CTBS9contig.9 | Human mitochondrion, complete genome |
| 150 | CTBS9contig.18 | Homo sapiens cDNA: FLJ23156 fis, clone LNG09609 |
| 151 | CTBS9contig.19 | Human mRNA for pro-alpha-1 type 3 collagen |
| 152 | CTBS9contig.21 | Homo sapiens SFRS protein kinase 1 (SRPK1), mRNA |
| 153 | CTBS9contig.22 | Human nonspecific crossreacting antigen mRNA, |
| | | complete cds |
| 154 | CTBS9contig.33 | Homo sapiens putative G protein-coupled receptor |
| | | (GPCR150), mRNA |
| 155 | CTBS9contig.43 | Homo sapiens guanine nucleotide binding protein (G |
| | | protein), betapolypeptide 2-like 1 (GNB2L1), mRNA |
| 156 | CTBS9contig.44 | Homo sapiens PEG1/MEST mRNA, complete cds |

[1455] An additional 1022 clones from this library were randomly amplified and sequenced. These are disclosed in SEQ ID NOS:255-1276.

### Example 3

[1456] Identification of cDNAs Encoding Duke's Stage C and D, Grade II-III Colon Tumor Proteins

[1457] This Example illustrates the identification of cDNA molecules encoding Duke's Stage C and D, grade II-III colon tumor proteins.

[1458] Fifteen hundred clones from a subtraction library were characterized by microarray analysis, all representing cDNA fragments from Duke's Stage C and D, grade II-III primary colon tumors subtracted with normal tissues including lymph node, PBMC, small intestine, stomach, pancreas, lung, brain, heart, and normal colon. This subtraction, based on a PCR-based subtraction protocol developed by Clontech (Palo Alto, Calif.), generated a library representing genes that are over-expressed or exclusively expressed in Duke's Stage C and D colon tumor tissue.

[1459] Random clones from this library were PCR amplified and found to be overexpressed in specific tumor tissues as determined by microarray analysis. Using this approach, cDNA sequences were PCR amplified and their mRNA expression profiles in tumor and normal tissues are examined using cDNA microarray technology essentially as described (Schena, M. et al., (1995) Science 270:467-70). In brief, the clones were arrayed onto glass slides as multiple replicas, with each location corresponding to a unique cDNA clone (as many as 5500 clones can be arrayed on a single slide, or chip). Each chip was hybridized with a pair of cDNA probes that are fluorescence-labeled with Cy3 and Cy5, respectively. Typically, 1 μg of polyA⁺ RNA is used to generate each cDNA probe. After hybridization, the chips were scanned and the fluorescence intensity recorded for both Cy3 and Cy5 channels. There were multiple built-in quality control steps. First, the probe quality was generally monitored using a panel of ubiquitously expressed genes. Secondly, the control plate included yeast DNA fragments of which complementary RNA was spiked into the probe synthesis for measuring the quality of the probe and the sensitivity of the analysis. Currently, the technology offers a sensitivity of about 1 in 100,000 copies of mRNA. Finally, the reproducibility of this technology was ensured by including duplicated control cDNA elements at different locations.

[1460] The microarray data were analyzed. Twenty-two clones with two-fold overexpression in colon tumors as compared to normal colon tissue, were selected and their sequences were determined by DNA sequencing. Seventeen of the 22 represented unique clones and these were then searched against public databases including Genbank and EST. Those showing some degree of similarity with known sequences in the databases are described in Table 7. Two cDNAs were identified that showed no significant similarity to any known sequences. These are listed in Table 8.

TABLE 7
GENBANK SEARCH RESULTS FOR cDNA MOLECULES
ENCODING DUKE'S C AND D COLON TUMOR PROTEINS

| SEQ ID | Clone | |
|---|---|---|
| NO: | Identifier | Genbank Search Results |
| 157 | 68066 | DNA-dependent protein kinase catalytic subunit |
| 158 | 68065 | Bumetanide-sensitive Na-K-Cl cotransporter |
| 159 | 68076 | Histone deacetylase 1 |
| 160 | 68067 | CD9 antigen |
| 161 | 68061 | Coatomer protein complex, subunit beta |
| 162 | 68071 | Bumetanide-sensitive Na-K-Cl cotransporter |
| 163 | 68069 | Lysyl-tRNA synthetase |
| 164 | 68064 | U4/U6 snRNP 60 kDa protein gene |
| 165 | 68059 | Myosin regulatory light chain |
| 166 | 68073 | Fibronectin |
| 167 | 68057 | cDNA FLJ21409 fis, clone COL03924 |
| 168 | 68062 | Chromosome 8p11.2, clone:91h23 to 9-41 |
| 169 | 68063 | 12p13.3 PAC RPCI1-96H9 |
| 170 | 68070 | KIAA1077 protein |
| 171 | 68075 | cDNA DKFZp564M0264 |

[1461] TABLE 8
cDNA MOLECULES ENCODING DUKE'S C AND D COLON TUMOR
PROTEINS THAT SHOWED NO SIGNIFICANT SIMILARITY TO
KNOWN SEQUENCES

| SEQ ID | Clone |
|---|---|
| NO: | Identifier |
| 172 | 68060 |
| 173 | 68058 |

### Example 4

[1462] Identification of Additional cDNAs Encoding Duke's Stage C and D, Grade II-III Colon Tumor Proteins

[1463] This Example illustrates the identification of additional cDNA molecules encoding Duke's Stage C and D, grade II-III colon tumor proteins.

[1464] Fifteen hundred clones from a subtraction library were characterized by microarray analysis, all representing cDNA fragments from Duke's Stage C and D, grade II-III primary colon tumors subtracted with normal tissues including lymph node, PBMC, small intestine, stomach, pancreas, lung, brain, heart, and normal colon. This subtraction, based on a PCR-based subtraction protocol developed by Clontech (Palo Alto, Calif.) and described in Example 1, generated a library representing genes that are over-expressed or exclusively expressed in Dukes Stage C and D colon tumor tissue.

[1465] Random clones from this library were PCR amplified and found to be overexpressed in specific tumor tissues as determined by microarray analysis as described in Example 3. One hundred and eight clones with two-fold overexpression in colon tumors as compared to normal colon tissue were selected and their sequences were determined by DNA sequencing. Eighty-one of these 108 represented unique clones and were searched against public databases including Genbank and EST. Those showing some degree of similarity with sequences in the databases are described in Table 9. Five cDNAs were identified that showed no significant similarity to known sequences in the database. These are listed in Table 10.

TABLE 9
GENBANK SEARCH RESULTS FOR cDNA MOLECULES
ENCODING DUKE'S STAGE C AND D COLON TUMOR PROTEINS

| | Clone | |
|---|---|---|
| SEQ ID | Identi- | |
| NO: | fier | Genbank Search Results |
| 174 | 68384 | Hepatocellular carcinoma associated-gene TB6 |
| 175 | 68421 | DNA of undertermined origin found 5′ to NCA |
| 176 | 68459 | Tumor-associated calcium signal transducer 1 |
| 177 | 68461 | Keratin 18 |
| 178 | 68435 | Serine protease inhibitor, Kunitz type 2 |
| 179 | 68405 | Human ADP/ATP carrier protein |
| 180 | 68460 | Human Ig J chain gene |
| 181 | 68448 | Chloride channel, calcium activated, family |
| | | member 1 |
| 182 | 68493 | Human hephaestin |
| 183 | 68477 | Tumor-associated calcium signal transducer 1 |
| 184 | 68431 | Ribosomal protein, large, P0 |
| 185 | 68476 | Human Tis 11d gene |
| 186 | 68466 | Human cell-type T-cell immunoglobulin gamma- |
| | | chain, V region |
| 187 | 68446 | Protein tyrosine phosphatase, non-receptor type 12 |
| 188 | 68444 | Proteasome subunit, beta type, 1 |
| 189 | 68388 | Human epithelial membrane protein 1 |
| 190 | 68470 | Human Tis 11d gene |
| 191 | 68465 | Human junction plakoglobin |
| 192 | 68463 | Human collagen, type I, alpha 2 |
| 193 | 68468 | Human pyruvate dehydrogenase alpha 1 |
| 194 | 68439 | Human ubiquitin-conjugating enzyme E2 variant 1 |
| 195 | 68438 | Human neutrophil-activating ENA-78 prepeptide |
| | | gene |
| 196 | 68436 | Human nonspecific crossreacting antigen |
| 197 | 68484 | Human GTT1 protein |
| 198 | 68478 | Human proteolipid protein 2 (colonic epithelium- |
| | | enriched) |
| 199 | 68490 | Human ribosomal protein L3 |
| 200 | 68488 | Human fibronectin |
| 201 | 68485 | Human antigen CD9 gene |
| 202 | 68491 | Human pro alpha 1 (I) collagen gene |
| 203 | 68483 | Human myosin regulatory light chain |
| 204 | 68382 | Human CD24 antigen |
| 205 | 68494 | Human nonspecific crossreacting antigen |
| 206 | 68391 | Human mucin 2, intestinal/tracheal |
| 207 | 68481 | Human glutathione peroxidase 2 (gastrointestinal) |
| 208 | 68386 | Human mucin 2, intestinal/tracheal |
| 209 | 68467 | Human non-histone chromosomal protein HMG-14 |
| | | gene |
| 210 | 68394 | Human lysosomal-associated protein transmembrane |
| | | 4 alpha |
| 211 | 68407 | Human tight junction protein 1 |
| 212 | 68427 | Human epidermal growth factor receptor |
| 213 | 68496 | Human collagen, type III, alpha 1 |
| 214 | 68430 | CEA |
| 215 | 68447 | Human epithelial V-like antigen 1 |
| 216 | 68417 | Human glycoprotein A33 (transmembrane) |
| 217 | 68401 | Human mitogen-activated protein kinase kinase |
| | | kinase kinase 3 |
| 218 | 68389 | Human Na, K-ATPase alpha aubunit |
| 219 | 68455 | Human histone deacetylase 1 |
| 220 | 68393 | Human transmembrane 4 superfamily member 3 |
| 221 | 68404 | Human glutathione S-transferae pi |
| 222 | 68457 | Human epithelial sodium channel alpha-subunit gene |
| 223 | 68458 | Human Ran_GTP binding protein 5 |
| 224 | 68450 | Human integrin, beta 1 |
| 225 | 68418 | Human bumetanide-sensitive Na-K-Cl cotransporter |
| 226 | 68422 | Human cathepsin C |
| 227 | 68409 | Human UDP-N-acetylglucosamine 2-epimerase gene |
| 228 | 68425 | 42 kda myristoylated alanine-rich C kinase substrate |
| 229 | 68415 | Human HALPHA44 gene for alpha-tubulin |
| 230 | 68414 | Human nonspecific crossreacting antigen |
| 231 | 68437 | cDNA FLJ22131 fis, clone HEP20245 |
| 232 | 68392 | Human BAC clone RP11-467H10 from 7 |
| 233 | 68406 | KIAA1217 |
| 234 | 68400 | Chromosome 17, clone hRPK.318_A_15 |
| 235 | 68442 | cDNA FLJ23142 fis, clone LNG09115 |
| 236 | 68443 | cDNA FLJ21353 fis, clone COL02771 |
| 237 | 68381 | KIAA0206 |
| 238 | 68441 | KIAA1191 |
| 239 | 68440 | cDNA FLJ12933 fis, clone NT2Rp2004962 |
| 240 | 68479 | Human chromosome 17, clone hRPC.1073_F_15 |
| 241 | 68390 | cDNA FLJ22182 fis, clone HRC00953 |
| 242 | 68380 | KIAA0184 |
| 243 | 68403 | KIAA0038 |
| 244 | 68416 | KIAA0196 |
| 245 | 68424 | cDNA DKFZp564O0122 |
| 246 | 68413 | Human clone 25076 mRNA sequence |
| 247 | 68419 | BAC clone RP11-697M17 from 8 |
| 248 | 68420 | Human clone 24659 mRNA sequence |
| 249 | 68411 | cDNA FLJ21339 fis, clone COL02601 |

[1466] TABLE 10
cDNA MOLECULES ENCODING DUKE'S STAGE C AND D COLON
TUMOR PROTEINS THAT SHOWED NO SIGNIFICANT
SIMILARITY TO KNOWN SEQUENCES

| SEQ ID | Clone |
|---|---|
| NO: | Identifier |
| 250 | 68471 |
| 251 | 68492 |
| 252 | 68399 |
| 253 | 68412 |
| 254 | 68451 |

### Example 5

[1467] Identification of Colon Tumor Antigens from an Expression Library

[1468] This example describes the isolation of cDNAs encoding colon tumor antigens by screening an expression library.

[1469] Total membrane preparations were made using the CT391-12 colon tumor cell line as described below and used to generate rabbit anti serum. Colon tumor antigens were then cloned by serological screening of a colon expression library with the rabbit plasma membrane anti serum. The library was constructed with mRNA extracted from the CT391-12 cell line in the Lambda Zap Express vector (Stratagene, La Jolla, Calif.).

[1470] For the membrane preparation, CT391-12 cells were pelleted and homogenized with a Dounce Homogenizer in 250 mM sucrose, 10 mM HEPES, 1 mM EDTA, and one complete protease inhibitor tablet (Roche), at pH 7.4. The homogenized cells were pelleted at 800×g to remove cell debris and then at 8000×g to remove organelles. The remaining supernatant was ultracentrifuged at 100,000×g to pellet the membranes. Protein concentration was determined by the method of Lowry and the membranes injected into rabbits at 0.5 mg/ml for the generation of antiserum.

[1471] Immuno-reactive proteins were screened from approximately 4×10⁵ PFU from the unamplified cDNA expression library. Fifteen 150 mm LB agar petri dishes were plated with approximately 3×10⁴ PFU and incubated at 42° C. until plaques formed. Nitrocellulose filters (Schleicher and Schuell), pre-wet with 10 mM IPTG, were placed on the plates and then incubated at 37° C. over night. Filters were then removed and washed 3× with PBS, 0.1% Tween 20, blocked with 1.0% BSA (Sigma) in PBS, 0.1% Tween 20, and finally washed 3× with PBS, 0.1% Tween 20. Blocked filters were then incubated overnight at 4° C. with rabbit antiserum that was developed against a total membrane preparation of the cell line, diluted 1:200 in PBS, 0.1% Tween-20 and preadsorbed with E. coli lysates and other proteins such as galactin 4, murin type C retrovirus envelope protein, and GAPDH to remove superfluous and irrelevant antibodies. Normal tissue lysates, PBMC, trachea, and prostate epithelial cell line, were also added to the antiserum. The filters were then washed 3× with PBS-Tween 20 and incubated with a goat-anti-rabbit IgG (H and L) secondary antibody (diluted 1:1000 with PBS-Tween 20) conjugated with alkaline phosphatase (Rockland Laboratories) for 1 hr. These filters were then washed 3× with PBS, Tween 20 and 2× with alkaline phosphatase buffer (pH 9.5) and finally developed with NBT/BCIP (Gibco BRL). Reactive plaques were excised from the LB agarose plates and a second or third plaque purification was performed following the same protocol. Excision of phagemid followed the Stratagene Lambda ZAP Express protocol, and resulting plasmid DNA was sequenced with an automated sequencer (ABI) using M13 forward, reverse and internal DNA sequencing primers. Nucleic acid homology searches were performed against the GenBank nucleic acid database. Those sequences showing some degree of similarity to known sequences in the database are described in Table 11. Those sequences that showed no significant similarity to known sequences in the database are listed in Table 12.

TABLE 11
GENBANK SEARCH RESULTS FOR cDNA MOLECULES ENCODING CT391-12
COLON TUMOR ANTIGENS

| SEQ ID | Clone | | GenBank |
|---|---|---|---|
| NO: | Identifier | Genbank Search Results | Accession # |
| 1277 | 59978 | Human major Yo paraneoplastic antigen (CDR2) | M63256 |
| | | mRNA | |
| 1278 | 59979 | Mink cell focus forming virus long terminal repeat | M26170 |
| | | (LTR) RNA | |
| 1279 | 59980 | Unknown Hu. chromosome 16 clone RPCI- | AC020663 |
| | | 11_127I20 | |
| 1280 | 59984 | Hu. secreted cement gland protein XAG-2 homolog | AF038451 |
| 1281 | 59987 | Human growth factor-inducible 2A9 gene | M14300 |
| 1282 | 59990 | Ribosomal protein L19 [human, breast cancer cell | S56985 |
| | | line | |
| 1283 | 60003 | Human mRNA for ezrin. | X51521 |
| 1284 | 60005 | Unknown Hu. BAC clone GS1-286B23 from | AC006151 |
| | | 7q21.1-q21.3 | |
| 1285 | 67009 | Vaculor sorting protein 29; Homo sapiens x 007 | AF168716 |
| | | protein mRNA | |
| 1286 | 60007 | Hu. mRNA translocon-associated protein delta | Z69043 |
| | | subunit | |
| 1287 | 60009 | Mink cell focus-forming 247 MuLV env gene | J02249 |
| 1288 | 60012 | Human MRL3 mRNA for ribosomal protein L3 | X06323 |
| | | homologue | |
| 1289 | 60018 | Human ribosomal protein S13 (RPS13) mRNA | L01124 |
| 1291 | 63822 | Unknown Hu. mRNA for KIAA0242 protein; | D87684 |
| | | FLJ23318 | |
| 1292 | 63823 | Hu. X-ray repair complementing defective repair | NM021141 |
| | | 80kD CC5) | |
| 1293 | 63824 | Hu. cadherin 17, LI cadherin (liver-intestine) | NM004063 |
| | | (CDH17) mRNA | |
| 1294 | 67014 | Hu. lectin, galactoside-binding, soluble, 4 (galectin | NM006149 |
| | | 4) | |
| 1295 | 63847 | Hu. Wiskott-Aldrich syndrome-like (WASL), | NM003941 |
| | | mRNA | |
| 1296 | 67023 | Homo sapiens mRNA for galectin-3 | AB006780 |
| 1297 | 63859 | Murine type C retrovirus, complete genome | NC001702 |
| 1298 | 64405 | Ribosome binding protein 1 | AB037819 |
| 1299 | 65037 | Hu. aspartate beta-hydroxylase (ASPH) mRNA | NM004318 |
| 1300 | 65047 | Hu. adaptor-related protein complex 3, mu 2 | NM006803 |
| | | subunit(AP3M2) | |
| 1301 | 65058 | Murine leukemia virus mRNA for env protein | D00620 |
| 1303 | 65085 | Hu. methionine adenosyltransferase II, alpha | NM005911 |
| | | (MAT2A) Mrna | |
| 1304 | 65087 | Homo sapiens peptidase D (PEPD) mRNA | NM000285 |
| 1305 | 65089 | Unknown Hu. mRNA; cDNA DKFZp434E0727 | AL133017 |
| 1306 | 65101 | Unknown Hu. DNA from chromosome 19, cosmid | AC004030 |
| | | F21856 | |
| 1307 | 65112 | Homo sapiens ribosomal protein L34 (RPL34) | NM000995 |
| | | mRNA | |
| 1308 | 65118 | Hu. eukaryotic translation elongation factor 1 delta | NM001960 |
| 1309 | 65124 | Hu. DEAD/H (Asp-Glu-Ala-Asp/His) box | NM004396 |
| | | polypeptide 5 DX5) | |
| 1310 | 65125 | Hu. calcyclin binding protein (CACYBP), Mrna | NM014412 |
| 1311 | 65142 | Human cytovillin 2 (VIL2) mRNA | J05021 |
| 1312 | 65143 | Hu. itochondrial matrix protein P1 (nuclear | M22382 |
| | | encoded) | |
| 1313 | 65146 | Hu. transmembrane protein (63 kD) | NM006825 |
| 1314 | 65227 | Homo sapiens scaffold attachment factor B (SAFB) | NM002967 |
| 1315 | 65229 | Homo sapiens putative secreted protein XAG | AF088867 |
| | | mRNA | |
| 1316 | 65230 | Homo sapiens ribosomal protein s21 (RPS21) | NM001024 |
| | | mRNA | |
| 1317 | 65231 | Hu. farnesyltransferase, CAAX box, alpha (FNTA) | NM002027 |
| 1318 | 65233 | Hu. sapiens mRNA for TGN46 protein | X94333 |
| 1319 | 65235 | Human mitochondrion, complete genome | NC001807 |
| 1320 | 65237 | Hu. synaptogyrin 2 (SYNGR2) mRNA | NM004710 |
| 1321 | 67041 | Unknown Homo sapiens HSPC250 mRNA | AF151084 |
| 1322 | 65291 | Hu. ribosomal protein L26 (RPL26) | NM000987 |
| 1323 | 65330 | Hu. acetyl-Coenzyme A acyltransferase 1 | NM001607 |
| | | mitochondrial protein | |

[1472] TABLE 12
cDNA MOLECULES ENCODING CT391-12 COLON TUMOR
ANTIGENS THAT SHOWED NO SIGNIFICANT SIMILARITY
TO KNOWN SEQUENCES

| Seq ID | Clone | | GenBank |
|---|---|---|---|
| NO: | Identifier | Genbank Search Results | Accession # |
| 1290 | 60024 | Novel | L02953 |
| 1302 | 65075 | | |

### Example 6

[1473] Microarray Analysis of Additional cDNAS Obtained from the CTBS9 Subtraction Library

[1474] To further identify genes overexpressed in colon tumors, an additional 1404 clones originating from the CTBS9 subtraction library described in Example 2 were placed on Colon Chip 5 and analyzed using microarray technologies as described in Example 3. A list of probes used to interrogate these clones is shown in Table 13. Clones that showed greater than two-fold overexpression in colon tumors versus a set of normal tissues were selected for further analysis. Of the 1404 clones placed on Colon Chip 5 from the CTBS9 library, 414 clones were selected based on this criteria and sequenced. Four hundred of the clones yielded sequence which could be analyzed. Fifty unique sequences identified from this analysis were searched against public databases and are disclosed herein (see SEQ ID NOs: 1324-1373 and Table 14 and Table 15). Those sequences showing some degree of similarity to known sequences in the database are described in Table 14. Those sequences that showed no significant similarity to known sequences in the database are listed in Table 15.

TABLE 13
PROBES USED IN MICROARRAY ANALYSIS OF cDNA CLONES
FROM CTBS9 SUBTRACTION LIBRARY

| | | Internal | External |
|---|---|---|---|
| Tissue | State | ID No: | ID No: |
| Colon Tumor | Dukes A | 650A | 864cy3 |
| Thymus Normal | Clontech | SPAAm5 | 864cy5 |
| Colon Tumor | Dukes A | 1000A | 865cy3 |
| Colon Normal | ND | 285 | 865cy5 |
| Colon Tumor | Dukes A | 1001A | 866cy3 |
| Colon Normal | ND | 670A | 866cy5 |
| Colon Tumor | Dukes A | 1002A | 867cy3 |
| Colon Normal | ND | 286 | 867cy5 |
| Colon Tumor | Dukes A | 647A | 868cy3 |
| Colon Normal | ND | 287 | 868cy5 |
| Colon Tumor | Dukes A | 648A | 869cy3 |
| Colon Normal | ND | 1003A | 869cy5 |
| Colon Tumor | Dukes A | 645A | 873cy3 |
| Kidney Normal | ND | 069CD | 873cy5 |
| Colon Tumor | Dukes A | 646A | 874cy3 |
| Lung Normal | Pool 2000 | LN2000 | 874cy5 |
| Colon Tumor | Dukes B | 685 | 875cy3 |
| Liver Normal | clontech | SPACT91 | 875cy5 |
| Colon Tumor | Dukes B | S17 | 876cy3 |
| Heart Normal | Clontech | SPACT87 | 876cy5 |
| Colon Tumor | Dukes B | 239A | 877cy3 |
| Esophagus Normal | Pool | 243/502 | 877cy5 |
| Colon Tumor | Dukes B | 1026A8 | 879cy3 |
| Small Intestine Normal | Clontech | SPACT65 | 879cy5 |
| Colon Tumor | Dukes B | 259A | 880cy3 |
| Stomach Normal | ND | 073A | 880cy5 |
| Colon Tumor | Dukes B | 574 | 881cy3 |
| Pancreas Normal | ND | 282A | 881cy5 |
| Colon Tumor | Dukes B | 235A | 882cy3 |
| Adrenal Gland Normal | Clontech | SPACT76 | 882cy5 |
| Colon Tumor | Dukes B | 218A | 883cy3 |
| Spleen Normal | Clontech | SPACT44 | 883cy5 |
| Colon Tumor | Dukes B | 575A | 884cy3 |
| Bronchus Normal | ND | 600CD | 884cy5 |
| Colon Tumor | Dukes B | 633A | 886cy3 |
| Brain Normal | Clontech | SPACT85 | 886cy5 |
| Colon Tumor | Dukes C | 1018A | 887cy3 |
| PBMC Resting | ND | 1194A | 887cy5 |
| Colon Tumor | Dukes C | 657A2 | 888cy3 |
| Bone Marrow Normal | ND | 410B | 888cy5 |
| Colon Tumor | Dukes C | 653A | 889cy3 |
| Aorta Normal | ND | 415ABD | 889cy5 |
| Colon Tumor | Dukes C | 1022A | 890cy3 |
| Spinal Cord Normal | Pool | 881/882 | 890cy5 |
| Colon Tumor | Dukes C | 1021A | 891cy3 |
| Skeletal Muscle Normal | Clontech | SPACT40 | 891cy5 |
| Colon Tumor | Dukes C | 863A2 | 892cy3 |
| Skin Normal | Pool | 490/601 | 892cy5 |
| Colon Tumor | Dukes C | 240A | 893cy3 |
| Fetal tissue Normal | ND | S91 | 893cy5 |
| Colon Tumor | Dukes D Primary | S19 | 894cy3 |
| Breast Normal | ND | S82 | 894cy5 |
| Colon Tumor | Dukes D primary | 663A | 895cy3 |
| Salivary Gland Normal | ND | 323B | 895cy5 |
| Colon Tumor | Dukes D primary | 659A | 896cy3 |
| Dendritic cells Normal | ND | 272A | 896cy5 |
| Colon Tumor | Dukes D mets to liver | 635A | 897cy3 |
| Lymph Nodes Normal | ND | SPACT6 | 897cy5 |
| Colon Tumor | Dukes D mets | 1014A2 | 901cy3 |
| Trachea Normal | ND | 779B | 901cy5 |
| Colon Tumor | Dukes D mets | 660A | 902cy3 |
| Pituitary Gland Normal | Clontech | SPACT67 | 902cy5 |
| Colon Tumor | Dukes D | 707A | 903cy3 |
| Bladder Normal | ND | 1062A | 903cy5 |
| Colon Tumor | Dukes D mets | 1015B | 904cy3 |
| Thyroid Normal | ND | 367A | 904cy5 |
| Colon Tumor | Dukes D | 636A | 905cy3 |
| PBMC activated Normal | ND | 1155A | 905cy5 |

ND: not determined

[1475] TABLE 14
GENBANK SEARCH RESULTS FOR cDNA MOLECULES ISOLATED
FROM THE CTBS9 SUBTRACTION LIBRARY

| SEQ ID | | # clones | |
|---|---|---|---|
| NO: | Clone Identifier | isolated | Genbank Search Results |
| 1345 | RO644:F01 | 1 | H.sapiens nek3 mRNA for protein kinase |
| 1354 | RO639:H11 | 1 | Homo sapiens BAC clone RP11-255L13 from |
| | | | 8, complete sequence |
| 1366 | 70919 | 1 | Homo sapiens cathepsin C (CTSC), mRNA |
| 1368 | 70847/RO639:B12 | 1 | Homo sapiens cDNA FLJ11493 fis, clone |
| | | | HEMBA1001940 |
| 1350 | RO641:A06 | 2 | Homo sapiens cDNA: FLJ21386 fis, clone |
| | | | COL03414 |
| 1329 | RO647:D08 | 5 | Homo sapiens cDNA: FLJ21569 fis, clone |
| | | | COL06508 |
| 1348 | R0641:C04 | 1 | Homo sapiens cDNA: FLJ21908 fis, clone |
| | | | HEP03830 |
| 1337 | RO642:G06 | 4 | Homo sapiens cDNA: FLJ23156 fis, clone |
| | | | LNG09609 |
| 1361 | RO646:H07 | 1 | Homo sapiens cDNA: FLJ23270 fis, clone |
| | | | COL10309, highly similar to HSU33271 Human |
| | | | normal keratinocyte |
| 1339 | R0636:E09 | 1 | Homo sapiens chromosome 16, P1 clone 94- |
| | | | 10H (LANL), complete sequence |
| 1326 | RO638:G1 | 31 | Homo sapiens chromosome 19 clone LLNLF- |
| | | | 112E5, (CEA) |
| 1346 | RO637:E06 | 1 | Homo sapiens chromosome 5 clone CTD- |
| | | | 2048F20, complete sequence |
| 1335 | RO636:D12 | 1 | Homo sapiens cytochrome P450, subfamily |
| | | | XXVIIB (25-hydroxyvitaminD-1-alpha- |
| | | | hydroxylase), polypeptide 1 (CYP27B1) |
| 1367 | 70830 | 1 | Homo sapiens ectodermal dysplasia 1, |
| | | | anhidrotic (ED1), mRNA |
| 1365 | 70875/RO641:E01 | 1 | Homo sapiens genomic DNA, chromosome |
| | | | 22q11.2, Cat Eye Syndrome |
| | | | region, clone:c60D12 (95% Identity) |
| 1349 | R0639:E11 | 1 | Homo sapiens hypothetical protein FLJ10040 |
| | | | (FLJ10040), mRNA |
| 1364 | 70855/C798P | 2 | Homo sapiens hypothetical protein FLJ20315 |
| | | | (FLJ20315), mRNA |
| 1336 | RO638:G10 | 4 | Homo sapiens hypothetical protein SP192 |
| | | | (SP192), mRNA |
| 1338 | R0637:B08 | 10 | Homo sapiens integrin, alpha 6 (ITGA6), |
| | | | mRNA (Contigs 15 and 29) |
| 1352 | R0640:F09 | 10 | Homo sapiens integrin, alpha 6 (ITGA6), |
| | | | mRNA (Contigs 15 and 29) |
| 1324 | R0639:B04 | 73 | Homo sapiens interleukin 8 (IL8), mRNA |
| | | | (Contigs 1 and 34) |
| 1357 | R0644:A12 | 73 | Homo sapiens interleukin 8 (IL8), mRNA |
| | | | (Contigs 1 and 34) |
| 1358 | RO636:D06 | 1 | Homo sapiens karyopherin (importin) beta 3 |
| | | | (KPNB3), mRNA |
| 1341 | RO637:D12 | 1 | Homo sapiens mRNA for KIAA0746 protein, |
| | | | partial cds |
| 1342 | RO642:G04 | 1 | Homo sapiens mRNA for KIAA1157 protein, |
| | | | partial cds |
| 1363 | 70848/B512S | 1 | Homo sapiens mRNA for TRAF and TNF |
| | | | receptor associated protein (ttrap gene) |
| 1331 | RO644:C03/C915P | 19 | Homo sapiens NADPH oxidase 1 (NOX1), |
| | | | transcript variant NOH-1L, mRNA |
| 1333 | RO641:C09 | 1 | Homo sapiens PAC clone RP1-170O19 from |
| | | | 7p15-p21, complete sequence |
| 1351 | R0636:F05 | 1 | Homo sapiens phosphatidylinositol transfer |
| | | | protein, membrane-associated (PITPNM) |
| 1327 | RO637:E03 | 7 | Homo sapiens putative G protein-coupled |
| | | | receptor (GPCR150), mRNA |
| 1343 | R0641:G08 | 1 | Homo sapiens SDHD gene for small subunit of |
| | | | cytochrome b of succinatedehydrogenase |
| 1356 | R0644:B10/C27E | 175 | Homo sapiens secreted cement gland protein |
| | | | XAG-2 homolog (hAG-2/R) mRNA, complete |
| 1369 | 70869 | 1 | Homo sapiens serine protease-like protein |
| | | | isoform (NSP) mRNA, alternatively spliced, |
| | | | complete cds (MAD homologue) |
| 1359 | R0636:B04 | 1 | Homo sapiens serine/threonine kinase 24 |
| | | | (Ste20, yeast homolog) (STK24), mRNA |
| 1328 | RO637:E04/C919P | 12 | Homo sapiens SFRS protein kinase 1 (SRPK1), |
| | | | mRNA (Contigs 5 and 9) |
| 1332 | RO64:B12/C919P | 12 | Homo sapiens SFRS protein kinase 1 (SRPK1), |
| | | | mRNA (Contigs 5 and 9) |
| 1373 | 70844/RO639:B05 | 1 | Homo sapiens targeting protein for Xklp2 |
| | | | (TPX2) mRNA, partial cds |
| 1325 | RO647:A08 | 7 | Homo sapiens tumor-associated calcium signal |
| | | | transducer 1 (TACSTD1), mRNA |
| 1347 | R0642:G07 | 1 | Human BAC clone CTB-66D11 from 7q22, |
| | | | complete sequence [Homo sapiens] |
| 1344 | R0642:F08 | 11 | Human carcinoembryonic antigen (CEA) gene, |
| | | | exon 10 |
| 1340 | R0637:B03 | 1 | Human DNA sequence from clone RP11-46B11 |
| | | | on chromosome 6, completesequence |
| 1353 | R0643:E06/C882P | 3 | Human DNA sequence from clone RP5-1056H1 |
| | | | on chromosome 20, complete sequence |
| 1372 | 70878 | 1 | Human microsomal stress 70 protein ATPase |
| | | | core (stch) mRNA, complete cds |

[1476] TABLE 15
cDNA MOLECULES FROM THE CTBS9 SUBTRACTION
LIBRARY THAT SHOWED NO SIGNIFICANT
SIMILARITY TO KNOWN SEQUENCES

| SEQ ID | | # clones |
|---|---|---|
| NO: | Clone Identifiers | isolated |
| 1330 | RO639:D12/C968P/70836 | 1 |
| 1371 | 70849 | 1 |
| 1334 | RO637:H11/Contig 11 | 1 |
| 1355 | R0642:F02/B723P/Contig 33 | 1 |
| 1360 | R0641:C07/Contig 38 | 1 |
| 1362 | R0641:D01/Contig 41 | 1 |
| 1370 | 70836/C968P/Contig 7 | 4 |

### Example 7

[1477] Microarray Analysis of cDNAs Obtained from the CT391-12 Expression Library

[1478] The clones originating from the CT391-12 Expression library described in Example 5 were placed on Colon Chip 5 and further analyzed using microarray technologies as described in Example 3. Microarray data, confirmed by visual analysis, showed cDNAs that appear to be overexpressed by at least two fold over normal tissues. The sequences of the overexpressed cDNAs were then searched against public databases. Those sequences showing some degree of similarity with known sequences in the database are shown in Table 16. Included in this table are three additional cDNA sequences designated CTM-94,-226 and -303. Those sequences showing no significant similarity to sequences in the database are described in Table 17.

TABLE 16
GENBANK SEARCH RESULTS FOR cDNA MOLECULES ENCODING CT391-12
COLON TUMOR ANTIGENS OVEREXPRESSED IN COLON TUMORS

| SEQ ID | | Clone | | | | |
|---|---|---|---|---|---|---|
| NO: | Clone | Identifier | Insert | Genseq | Description | Expression* |
| 1318 | CTM-270 | 65233 | 1.6 | A08035 | Hu.sapiens mRNA for | Visual |
| | | | | | TGN46 protein | |
| 1376 | CTM-303 | 65328 | 3 | A08035 | H.sapiens mRNA for | 3.23/- |
| | | | | | TGN46 protein | |
| 1321 | CTM-278 | 67041 | 0.9 | A12405 | Unknown Homo sapiens | Visual |
| | | | | | HSPC250 mRNA | |
| 1305 | CTM-170 | 65089 | 1.6 | A26961 | Unknown Hu. mRNA; | 2.47/- |
| | | | | | cDNA DKFZp434E0727 | |
| 1303 | CTM-166 | 65085 | 3.5 | A43214 | Hu.methionine | Visual |
| | | | | | adenosyltransferase II, | |
| | | | | | alpha (MAT2A) Mrna | |
| 1374 | CTM-94 | 67024 | 3.2 | C01319 | Human cytovillin 2 (VIL2) | Visual |
| | | | | | mRNA | |
| 1304 | CTM-168 | 65087 | 0.5 | Q04531 | Homo sapiens peptidase D | Visual |
| | | | | | (PEPD) mRNA | |
| 1300 | CTM-128 | 65047 | 2 | T29388 | Hu.adaptor-related protein | Visual |
| | | | | | complex 3, mu 2 | |
| | | | | | subunit(AP3M2), | |
| 1279 | CTM-7 | 59980 | 1.5 | T47520 | Bone marrow prot | Visual |
| | | | | | BM045/chrom. 16 clone | |
| | | | | | RPCI-11 127I20 | |
| 1294 | CTM-81 | 67014 | 1.6 | T59539 | Hu.lectin, galactoside- | 3.33/- |
| | | | | | binding, soluble, 4 | |
| | | | | | (galectin 4) | |
| 1315 | CTM-265 | 65229 | 1.9 | T84476 | Home sapiens putative | 3.37/2.97 |
| | | | | | secreted protein XAG | |
| | | | | | mRNA | |
| 1298 | CTM-116 | 64405 | 3 | V41922 | Ribosome-binding protein | Visual |
| | | | | | 1/mRNA for KIAA1398 | |
| 1306 | CTM-182 | 65101 | 1.5 | V62310 | Unknown Hu.DNA from | 2.30/- |
| | | | | | chromosome 19, cosmid | |
| | | | | | F21856 | |
| 1284 | CTM-29 | 60005 | 1 | Z09252 | LINE1 (L1.3)/BAC clone | Visual |
| | | | | | GS1-286B23 from | |
| | | | | | 7q21.1-q21.3 | |
| 1310 | CTM-215 | 65125 | 3.6 | Z33476 | Hu.calcyclin binding | 2.03/- |
| | | | | | protein (CACYBP), Mrna | |
| 1375 | CTM-226 | 65134 | 3 | Z57868 | Scaffold attachment factor | Visual |
| | | | | | B/cDNA KIAA0138 | |
| 1296 | CTM-93 | 67023 | 1 | Z77549 | Homo sapiens mRNA for | 2.23/- |
| | | | | | galectin-3 | |
| 1288 | CTM-36 | 60012 | 1.2 | Z80559 | Human MRL3 mRNA for | Visual |
| | | | | | ribosomal protein L3 | |
| | | | | | homologue | |

* Mean expression value: (Tumor/Normal minus colon)/(Tumor/Normal). Visual: visual analysis only

[1479] TABLE 17
cDNA MOLECULES ENCODING CT391-12 COLON TUMOR ANTIGENS
OVEREXPRESSED IN COLON TUMORS THAT SHOWED NO SIGNIFICANT
SIMILARITY TO KNOWN SEQUENCES

| SEQ ID | | Clone | | | |
|---|---|---|---|---|---|
| NO: | Clone | Identifier | Insert | Description | Expression* |
| 1291 | CTM-64 | 63822 | 4 | Unknown Hu.mRNA for KIAA0242 | Visual |
| | | | | protein/FLJ23318fis | |
| 1302 | CTM-156 | 65075 | 3 | | Visual |
| 1313 | CTM-239 | 65146 | 2.08 | Hu.transmembrane protein (63kD) | 2.12/- |

*Mean expression value: (Tumor/Normal minus colon)/(Tumor/Normal). Visual: visual analysis only.

### Example 8

[1480] Identification of Additional Colon Tumor Antigens from an Expression Library

[1481] Additional clones originating from the CT391-12 expression library described in Example 5 were sequenced using standard methods and then searched against public databases. These sequences are disclosed in SEQ ID NOs: 1377-1417. Those sequences showing some degree of similarity with known sequences in the database are shown in Table 18. Those sequences showing no significant similarity to sequences in the e are described in Table 19.

TABLE 18
GENBANK SEARCH RESULTS FOR cDNA MOLECULES ENCODING CT391-12
COLON TUMOR ANTIGENS

| SEQ | | Clone | | |
|---|---|---|---|---|
| ID NO. | Clone | ID | Insert | Description |
| 1377 | CTM2-4 | 71341 | 3.8 | Hu. villin 2 (ezrin) (VIL2), mRNA |
| 1378 | CTM2-10 | 70249 | 1.4 | Hu. anterior gradient 2 (Xenepus laevis) |
| | | | | homolog |
| 1380 | CTM2-18 | 71347 | 2.7 | Hu. ribosomal protein L18a (RPL18A), mRNA |
| 1381 | CTM2-30 | 71352 | 0.8 | Hu. calcyclin binding protein (CACYBP), |
| | | | | mRNA |
| 1384 | CTM2-34 | 71354 | 1.4 | Hu. hypoxia-inducible gene 1 (HIG1) mRNA |
| 1385 | CTM2-35 | 71355 | 2 | Hu. heat shock 60 kD protein 1 (chaperonin) |
| | | | | (HSPD1 |
| 1386 | CTM2-41 | 71356 | 0.6 | Hu. heat shock 10 kD protein 1 (chaperonin 10) |
| | | | | (HSPE1) mRNA |
| 1388 | CTM2-48 | 71362 | 2.5 | Hu. ninein (LOC51199), mRNA |
| 1389 | CTM2-52 | 70261 | 0.9 | Hu. anterior gradient 2 (Xenepus laevis) |
| | | | | homolog (AGR2), mRNA |
| 1390 | CTM2-54 | 71366 | 2 | Hu. SCO (cytochrome oxidase deficient, yeast) |
| | | | | homolog 1 |
| 1391 | CTM2-59 | 70263 | 0.6 | Hu. ribosomal protein L24 (RPL24) |
| 1393 | CTM2-62 | 71368 | 3 | Hu. IgG Fc binding protein (FC(GAMMA)BP) |
| | | | | mRNA |
| 1394 | CTM2-66 | 70265 | 0.6 | Hu. endoplasmic reticulum lumenal protein |
| | | | | (ERP28), mRNA |
| 1395 | CTM2-69 | 71372 | 1.2 | Human prothymosin alpha mRNA |
| 1398 | CTM2-104 | 73031 | 4 | Hu. ataxin-1 ubiquitin-like interacting protein |
| | | | | (A1U), mRNA |
| 1399 | CTM2-111 | 73038 | 1.6 | Human liver mRNA for 3-oxoacyl-CoA |
| | | | | thiolase |
| 1400 | CTM2-119 | 73044 | 0.4 | Hu. actin related protein 2/3 complex |
| 1401 | CTM2-124 | 73049 | 1 | Hu. transmembrane trafficking protein |
| | | | | (TMP21) |
| 1402 | CTM2-127 | 73052 | 0.5 | Hu. hypothetical protein Nop10p (Nop10p), |
| | | | | mRNA |
| 1403 | CTM2-142 | 73058 | 3 | Hu. villin 2 (ezrin) (VIL2), mrNA |
| 1404 | CTM2-146 | 73061 | 0.9 | Hu. ribosomal protein L5 (RPL5) |
| 1405 | CTM2-147 | 73062 | 0.8 | Hu. sperm antigen-36 mRNA |
| 1406 | CTM2-154 | 73068 | 0.9 | Hu. mRNA for galectin-3 |
| 1407 | CTM2-158 | 73072 | 2 | Hu. acetyl-Coenzyme A acyltransferase 1 |
| 1408 | CTM2-162 | 73076 | 0.4 | Hu. IgG Fc binding protein (FC(GAMMA)BP) |
| | | | | mRNA |
| 1409 | CTM2-180 | 75425 | 0.5 | Hu. acetyl-Coenzyme A acyltransferase 1 |
| 1410 | CTM2-235 | 75444 | 0.8 | Hu. eukaryotic translation initiation factor 4A |
| 1411 | CTM2-244 | 75451 | 3.4 | Hu. sapiens mRNA for TGN46 protein |
| 1412 | CTM2-248 | 75456 | 3 | Hu. cadherin 17, LI cadherin (liver-intestine) |
| 1413 | CTM2-253 | 75461 | 2.8 | Hu. cadherin 17, LI cadherin (liver-intestine) |
| 1415 | CTM2-259 | 75465 | 0.7 | Hu. lectin, galactoside-binding, soluble, 3 |
| 1416 | CTM2-278 | 75483 | 3 | Hu. uveal autoantigen mRNA |
| 1417 | CTM2-281 | 75486 | 1 | Hu. thimet oligopeptidase 1, clone MGC:8357, |
| | | | | mRNA |
| 1382, | CTM2-33 | 71353 | 2.8 | Hu. small intestinal mucin (MUC3) mRNA |
| 1383 | | | | |

[1482] TABLE 19
cDNA MOLECULES ENCODING CT391-12 COLON TUMOR
ANTIGENS THAT SHOWED NO SIGNIFICANT SIMILARITY
TO KNOWN SEQUENCES

| SEQ | | Clone | | |
|---|---|---|---|---|
| ID NO. | Clone | ID | Insert | Description |
| 1379 | CTM2-17 | 70254 | 2.1 | KIAA0105, mRNA |
| 1387 | CTM2-43 | 71358 | 1.4 | Hu. sapiens cDNA; FLJ22523 |
| | | | | fis, clone HRC12507 |
| 1392 | CTM2-60 | 71367 | 2 | DKFZP564B167 protein |
| | | | | (DKFZP564B167) |
| 1396 | CTM2-92 | 71385 | 1.2 | Hu. cDNA FLJ10051 fis, |
| | | | | clone HEMBA1001281 |
| 1397 | CTM2-95 | 71388 | 2.6 | Hu. chromosome 5 clone |
| | | | | CTC-534A2 |
| 1414 | CTM2-254 | 75462 | 1.6 | Hu. chromosome 19, cosmid |
| | | | | F24200 |

### Example 9

[1483] Analysis of cDNA Expression using Real-time PCR

[1484] As described in Example 6, 50 cDNA sequences were identified by microarray and sequence analysis. Subsequent visual inspection of the microarray results yielded 15 clones that were selected for further analysis by quantitative (real time) PCR. The first-strand cDNA used in the quantitative real-time PCR was synthesized from 20 μg of total RNA that was treated with DNase I (Amplification Grade, Gibco BRL Life Technology, Gaithersburg, Md.), using Superscript Reverse Transcriptase (RT) (Gibco BRL Life Technology, Gaithersburg, Md.). Real-time PCR was performed with a GeneAmp™ 5700 sequence detection system (PE Biosystems, Foster City, Calif.). The 5700 system uses SYBR™ green, a fluorescent dye that only intercalates into double stranded DNA,and a set of gene-specific forward and reverse primers. The increase in fluorescence was monitored during the whole amplification process. The optimal concentration of primers was determined using a checkerboard approach and a pool of cDNAs from breast tumor was used in this process. The PCR reaction was performed in 25 μl volumes that included 2.5 μl of SYBR green buffer, 2 μl of cDNA template and 2.5 μl each of the forward and reverse primers for the gene of interest. The cDNAs used for RT reactions were diluted 1:10 for each gene of interest and 1:100 for the β-actin control. In order to quantitate the amount of specific cDNA (and hence initial mRNA) in the sample, a standard curve was generated for each run using the plasmid DNA containing the gene of interest. Standard curves were generated using the Ct values determined in the real-time PCR which were related to the initial cDNA concentration used in the assay. Standard dilution ranging from 20-2×10⁶ copies of the gene of interest was used for this purpose. In addition, a standard curve was generated for β-actin ranging from 200 fg-2000 fg. This enabled standardization of the initial RNA content of a tissue sample to the amount of β-actin for comparison purposes. The mean copy number for each group of tissues tested was normalized to a constant amount of β-actin, allowing the evaluation of the over-expression levels seen with each of the genes.

[1485] Of the fifteen clones analyzed by real time PCR, four showed overexpression in colon tumor and were assigned the following tumor antigen identities: C634S, C635S, C636S and C637S. The nucleotide sequences for these candidates are set forth in SEQ ID NOs: 1418-1421, respectively. Bioinformatic analyses were also performed using the fully elucidated insert sequences. Based on these sequences, potential open reading frames have been identified for C634S (SEQ ID NO: 1422), C635S (SEQ ID NO: 1423) and C637S (SEQ ID NO: 1424). A summary of the real-time and bioinformatics results is shown in Table 20. This summary contains the microarray, real-time PCR, and Genbank identity of each clone (if known).

TABLE 20
REAL-TIME PCR AND GENBANK ANALYSIS OF COLON TUMOR ANTIGENS

| | | | | | | Elevated | |
|---|---|---|---|---|---|---|---|
| | | | | | | Normal | Genbank |
| SEQ ID | Candidate | | | | | Tissue | Search |
| NO: | Name | Element | Ratio | CT | CN | Expression | Result |
| 1334, | C634S | RO637:H11 | 3.66 | 95% | Low | Thymus, | H. sapiens |
| 1418, | | | | | | bone | cMyc target |
| 1422 | | | | | | marrow, | JP01 mRNA, |
| | | | | | | esophagus, | complete cds |
| | | | | | | lymph node, | |
| 1350, | C6355 | RO641:A06 | 2.26 | 100% | Medium | heart, | H. sapiens |
| 1419, | | | | | | pancreas, sal. | cDNA:FLJ21 |
| 1423 | | | | | | gland, | 386 fis, clone |
| | | | | | | trachea, | COL03414 |
| | | | | | | esophagus | |
| 1365, | C636S | RO641:E01 | 2.28 | 95% | Low | Trachea | Chrom. |
| 1420 | | | | | | | 22q11.2, cat |
| | | | | | | | eye syndrome |
| | | | | | | | region, |
| | | | | | | | clone:c60D12 |
| 1361, | C637S | RO646:H07 | 2.48 | 100% | Low | Esophagus, | CDNA:FLJ2 |
| 1421, | | | | | | pancreas | 3270 fis, |
| 1424 | | | | | | | clone |
| | | | | | | | COL10309, |
| | | | | | | | similar to |
| | | | | | | | keratinocyte |
| | | | | | | | mRNA |

### Example 10

[1486] Bioinformatic and Real-time PCR Analysis of Colon Tumor Antigen C640S

[1487] The colon tumor antigen, C640S (SEQ ID NO: 1373), was further analyzed by real-time PCR as described in Example 9, and using bioinformatics. Real-time PCR expression profiling showed that this gene is overexpressed in 100% of colon tumor samples tested as compared to normal colon samples. Overexpression was also seen in bone marrow. Very low levels of expression were observed in skeletal muscle, esophagus, liver, brain, pancreas, and skin. A search of the sequence against Genbank showed that C640S is identified as the TPX2 gene (SEQ ID NO: 1425). The predicted ORF (SEQ ID NO: 1426) and potential protein functional information was further analyzed by PSORT II. This analysis indicates a protein of 747 amino acids that is likely targeted to the nucleus.

### Example 11

[1488] Additional Bioinformatic Analysis of Colon Tumor Antigen C636S

[1489] A Lifeseq Gold database search and analysis was performed to obtain additional sequence information for the colon tumor antigen, C636S, (set forth in SEQ ID NOs: 1365 and 1420). An additional 494 base pairs were obtained, extending beyond the 5′ end of the sequence. The extended cDNA sequence of C636S is set forth in SEQ ID NO: 1427). Two potential open reading frames of 89 and 62 amino acids were identified (SEQ ID NOs: 1428 and 1429, respectively).

### Example 12

[1490] Identification of Additional Colon Tumor Protein cDNAs

[1491] This Example illustrates the identification of additional cDNA molecules differentially expressed in colon tumors versus normal tissues.

[1492] A cDNA subtraction library containing cDNA from primary colon tumors subtracted with cDNA from normal tissues (liver, salivary gland, small intestine, stomach, heart, brain, bone marrow and normal lung) was constructed as follows. Total RNA was extracted from primary tissues using Trizol reagent (Gibco BRL Life Technologies, Gaithersburg, Md.) as described by the manufacturer. The polyA+ RNA was purified using an oligo(dT) cellulose column according to standard protocols. First strand cDNA was synthesized using the primer supplied in a Clontech PCR-Select cDNA Subtraction Kit (Clontech, Palo Alto, Calif.). The driver DNA consisted of cDNAs from normal tissues with the tester cDNA being from two primary colon tumors. Double-stranded cDNA was synthesized for both tester and driver, and digested with a combination of endonucleases (MluI, MscI, PvuII, SalI and StuI) which recognize six-nucleotide restriction sites. This modification of the digestion procedure resulted in an average cDNA size of 600 bp, rather than the average size of 300 bp that results from digestion with RsaI according to the Clontech protocol. This modification did not affect the subtraction efficiency. The digested tester cDNAs were ligated to two different adaptors and the subtraction was performed according to Clontech's protocol.

[1493] The tester and driver libraries were then hybridized using excess driver cDNA. In the first hybridization step, driver was separately hybridized with each of the two tester cDNA populations. This resulted in populations of (a) unhybridized tester cDNAs, (b) tester cDNAs hybridized to other tester cDNAs, (c) tester cDNAs hybridized to driver cDNAs and (d) unhybridized driver cDNAs. The two separate hybridization reactions were then combined, and rehybridized in the presence of additional denatured driver cDNA. Following this second hybridization, in addition to populations (a) through (d), a fifth population (e) was generated in which tester cDNA with one adapter hybridized to tester cDNA with the second adapter. Accordingly, the second hybridization step resulted in enrichment of differentially expressed sequences which could be used as templates for PCR amplification with adaptor-specific primers.

[1494] The ends were then filled in, and PCR amplification was performed using adaptor-specific primers. Only population (e), which contained tester cDNA that did not hybridize to driver cDNA, was amplified exponentially. A second PCR amplification step was then performed, to reduce background and further enrich differentially expressed sequences.

[1495] This PCR-based subtraction technique normalizes differentially expressed cDNAs so that transcripts that are overexpressed in colon tumor tissue may be recoverable. Such transcripts would be difficult to recover by traditional subtraction methods.

[1496] The resulting PCR products were subcloned into the TA cloning vector, pCRII (Invitrogen, San Diego, Calif.) and transformed into ElectroMax E. coli DH10B cells (Gibco BRL Life, Technologies) by electroporation. DNA was isolated from independent clones and sequenced using a Perkin Elmer/Applied Biosystems Division (Foster City, Calif.) Automated Sequencer Model 373A.

[1497] One thousand seven hundred ninety six randomly selected cDNA clones in the subtracted colon tumor-specific eDNA library were characterized by DNA sequencing and by subsequent Genbank and EST Blast database searches. Sequences of these partial cDNAs are provided in SEQ ID NO: 1430-3225.

### Example 13

[1498] Identification of Additional Colon Tumor Protein cDNAs

[1499] This Example illustrates the identification of additional cDNA molecules differentially expressed in colon tumors versus normal tissues.

[1500] One hundred and ninety-two individual clones were characterized by DNA sequencing as described above, all representing cDNA fragments from the PCR-based subtracted cDNA library enriched for clones that are overexpressed in colon tumors described in Example 12. These sequences are disclosed herein as SEQ ID NO: 3226-3417.

### Example 14

[1501] Peptide Priming of T-helper Lines

[1502] Generation of CD4⁺ T helper lines and identification of peptide epitopes derived from tumor-specific antigens that are capable of being recognized by CD4⁺ T cells in the context of HLA class II molecules, is carried out as follows:

[1503] Fifteen-mer peptides overlapping by 10 amino acids, derived from a tumor-specific antigen, are generated using standard procedures. Dendritic cells (DC) are derived from PBMC of a normal donor using GM-CSF and IL-4 by standard protocols. CD4⁺ T cells are generated from the same donor as the DC using MACS beads (Miltenyi Biotec, Auburn, Calif.) and negative selection. DC are pulsed overnight with pools of the 15-mer peptides, with each peptide at a final concentration of 0.25 μg/ml. Pulsed DC are washed and plated at 1×10⁴ cells/well of 96-well V-bottom plates and purified CD4⁺ T cells are added at 1×10⁵/well. Cultures are supplemented with 60 ng/ml IL-6 and 10 ng/ml IL-12 and incubated at 37° C. Cultures are restimulated as above on a weekly basis using DC generated and pulsed as above as antigen presenting cells, supplemented with 5 ng/ml IL-7 and 10 U/ml IL-2. Following 4 in vitro stimulation cycles, resulting CD4⁺ T cell lines (each line corresponding to one well) are tested for specific proliferation and cytokine production in response to the stimulating pools of peptide with an irrelevant pool of peptides used as a control.

### Example 15

[1504] Generation of Tumor-specific CTL Lines using in Vitro Whole-gene Priming

[1505] Using in vitro whole-gene priming with tumor antigen-vaccinia infected DC (see, for example, Yee et al, The Journal of Immunology, 157(9):4079-86, 1996), human CTL lines are derived that specifically recognize autologous fibroblasts transduced with a specific tumor antigen, as determined by interferon-γ ELISPOT analysis. Specifically, dendritic cells (DC) are differentiated from monocyte cultures derived from PBMC of normal human donors by growing for five days in RPMI medium containing 10% human serum, 50 ng/ml human GM-CSF and 30 ng/ml human IL-4. Following culture, DC are infected overnight with tumor antigen-recombinant vaccinia virus at a multiplicity of infection (M.O.I) of five, and matured overnight by the addition of 3 μg/ml CD40 ligand. Virus is then inactivated by UV irradiation. CD8+ T cells are isolated using a magnetic bead system, and priming cultures are initiated using standard culture techniques. Cultures are restimulated every 7-10 days using autologous primary fibroblasts retrovirally transduced with previously identified tumor antigens. Following four stimulation cycles, CD8+ T cell lines are identified that specifically produce interferon-y when stimulated with tumor antigen-transduced autologous fibroblasts. Using a panel of HLA-mismatched B-LCL lines transduced with a vector expressing a tumor antigen, and measuring interferon-γ production by the CTL lines in an ELISPOT assay, the HLA restriction of the CTL lines is determined.

### Example 16

[1506] Generation and Characterization of Anti-tumor Antigen Monoclonal Antibodies

[1507] Mouse monoclonal antibodies are raised against E. coli derived tumor antigen proteins as follows: Mice are immunized with Complete Freund's Adjuvant (CFA) containing 50 μg recombinant tumor protein, followed by a subsequent intraperitoneal boost with Incomplete Freund's Adjuvant (IFA) containing 10 μg recombinant protein. Three days prior to removal of the spleens, the mice are immunized intravenously with approximately 50 μg of soluble recombinant protein. The spleen of a mouse with a positive titer to the tumor antigen is removed, and a single-cell suspension made and used for fusion to SP2/O myeloma cells to generate B cell hybridomas. The supernatants from the hybrid clones are tested by ELISA for specificity to recombinant tumor protein, and epitope mapped using peptides that spanned the entire tumor protein sequence. The mAbs are also tested by flow cytometry for their ability to detect tumor protein on the surface of cells stably transfected with the cDNA encoding the tumor protein.

### Example 17

[1508] Synthesis of Polypeptides

[1509] Polypeptides are synthesized on a Perkin Elmer/Applied Biosystems Division 430A peptide synthesizer using FMOC chemistry with HPTU (O-Benzotriazole-N,N,N′,N′-tetramethyluronium hexafluorophosphate) activation. A Gly-Cys-Gly sequence is attached to the amino terminus of the peptide to provide a method of conjugation, binding to an immobilized surface, or labeling of the peptide. Cleavage of the peptides from the solid support is carried out using the following cleavage mixture: trifluoroacetic acid:ethanedithiol:thioanisole:water:phenol (40:1:2:2:3). After cleaving for 2 hours, the peptides are precipitated in cold methyl-t-butyl-ether. The peptide pellets are then dissolved in water containing 0.1% trifluoroacetic acid (TFA) and lyophilized prior to purification by C18 reverse phase HPLC. A gradient of 0%-60% acetonitrile (containing 0.1% TFA) in water (containing 0.1% TFA) is used to elute the peptides. Following lyophilization of the pure fractions, the peptides are characterized using electrospray or other types of mass spectrometry and by amino acid analysis.

[1510] From the foregoing it will be appreciated that, although specific embodiments of the invention have been described herein for purposes of illustration, various modifications may be made without deviating from the spirit and scope of the invention. Accordingly, the invention is not limited except as by the appended claims.

The application's sequence listing, which the Patent Office published only in electronic form, follows.

SEQUENCE LISTING (3417 sequences)

SEQ ID NO: 1 - DNA, 391 bp, Homo sapiens
gcccttagcgtggtcgcggccgaggtacttccggaaatcttccatcatggtgcgccttctctccaccaattcctttgaggctttggactgactcaaacgatccttctgttcaaagatcttagagtatttcttcagatcctttttaatttgcttgatctgttcctggctcaggagtgtgggaggccggggccgccacagcagctggcagaagcggtccttgttgttcttctgcaggaggcgtccctggaaagtccacagccagtacctgcccgggcggccgctcgaaagggcgaattctgcagatatccatcacactggcggccgctcgagcatgcatctagagggcccaattcgccctatagtgagtcgtattacaattcactggccgtcg

SEQ ID NO: 2 - DNA, 360 bp, Homo sapiens
ttcgcccttagcgtggtcgcggccgaggtactgcgaaaatatgcaggaagattaattttgtggcagttttctaaaactgacaaccaggtgggaccaaagtttatgtgcctttagtcttaatttaccttgcattgtaatattcagttttaataaatcttcaaaatattttgtatttaggaatagatctgactttaataaaaacatggctcagaatctacaggtcaaattaatttgaacagttcttgtcaatccgaattgttgattctgtttaaatgaccaatactttttgaaattgatgtacctgcccgggcggccgctcgaagggcgaattctgcagatatccatcacactggcggccgc

SEQ ID NO: 3 - DNA, 248 bp, Homo sapiens
  misc_feature 74, 248: n = A,T,C or G
tcgccctttcgagcggccgcccgggcaggtaccaatcttttgtgacatattgtcatgctgaggtgtgacacctnctgcactcatctgatgtaaaaccatcccagagctggcgagaggatggagctgggtggaaactgctttgcactatcgtttgcttggtgtttgtttttaacgcacaacttgcttgtacctcggccgcgaccacgctaagggccaattctgcagatatccatcacactggcggccgn

SEQ ID NO: 4 - DNA, 401 bp, Homo sapiens
  misc_feature 48, 50, 81, 260: n = A,T,C or G
ggaattcgcccttagcgtggtcgcggccgaggtactcttgaattttantntctgataccactgcactgtctgagaattttnaaaactttaatgaactaactgacagcttcatgaaactgtccaccaagatcaagcagagaaaataattaatttcatgggactaaatgaactaatgaggataatattttcataattttttatttgaaattttgctgattctttaaatgtcttgtttcccagatttcaggaaactttttttnttttaagctatccacagcttacagcaatttgataaaatatacttttgtgaacaaaaattgagacatttacattttctccctatgtggtcgctccatacttgggaaactattcatgaatatttatattgtatggtaatatag

SEQ ID NO: 5 - DNA, 131 bp, Homo sapiens
  misc_feature 44: n = A,T,C or G
attcgcccttagcgtggtcgcggccgaggtacatgctttctttncatctggcacctgagcaccaaggctggtgagtcccacgatggagtagaaggcagattccaaatttgtgaaagggcgatccagcgagg

SEQ ID NO: 6 - DNA, 419 bp, Homo sapiens
  misc_feature 54, 157, 184, 359, 401, 402: n = A,T,C or G
ggaattcgcccttggccgcccgggcaggtgcgggcgcagtgattataggctttngctctaagattaaaaatgccctagcccacttcttaccacaaggcacacctacaccccttatccccatactagatattatcagaaaccatcagcctactcattnaaccaatagccctggccgtacctcggncgcgaccacgctaagggcgaattctgcagatatccatcacactggcggccgctcgagcatgcatctagagggcccaattcgccctatagtgagtcgtattacaattcactggccgtcgttttacaacgtcgtgactgggaaaaccctggcgttacccaacttaatcgccttgcancacatccccctttagcagctggcgtaatagcgaagaggcccnnaccgatcgcccttccaa

SEQ ID NO: 7 - DNA, 390 bp, Homo sapiens
tcgcccttagcgtggtcgcggccgaggtacctaagagactatggaagaatttcagggtagctgggatgtcttttacataatacagcatttgaatcatatgaataaagtcccacttttgaagctcctttttctccaacattctactttggtattcagatgatgtctccttatgccaagcaaactttacgttctcgaggttcgatgtcttggctacaagctctttgtatttggcaatttgttcagcacttggctcaacaacttcattgttgatacaaactcctgggtattgagcctgaactttggagagaatttgaagatcaatttcacctgcacctccgctatgcttagaatcttaatttctgattttgtgtctccaatccttcctattat

SEQ ID NO: 8 - DNA, 544 bp, Homo sapiens
gcccttagcgtggtcgcggccgaggtacttttaaggcataataagggttaacattctaggcagtataaacacaccccataatgcaagtaataggtaatctagagatgtggactttattgctatatgggaattacatttaaatttgagggcattttatataaagaaaaatacagacctataaagtttggcatattcattaagttatcttttaatatttttttctagaaaacaggtgacatttgtatctacgataaaaatttttatacagaacctactgcctcaaactgaatcccatcaagaaaactagtttctattgtattagtaactcaaaataaattatcacttcgaaaacttgctttcccacactaaggtaagttcagactagattgaacactccagaattttttactacagactgtttttaagttagaagtgatggcaattttataaatagagaatatacttccactgatgcccttactgtgccaaaacaaaaatcttaagaaaagcaagtagacaccttcataactatgaatgaagctgc

SEQ ID NO: 9 - DNA, 396 bp, Homo sapiens
gcccttagcgtggtcgcggccgaggtacacaaatagttgattgtgctgccgtagcaaattggatcttctcttcagaactatctcgtgactttaccagattgtttgtttgggaaattttgcactctacaattcgtaagatgaacaaacatgtcctgaagatccagaaagagctgaaagaagctaaagagaaacttgctaggcaacacaaacggcgaagtgatgatgacgacagaagcagtgacaggaaagacggggttcttgaggaacaaatagaacgacttcaggaaaaagtggaatctgctcagagtgaacaaaagaatcttttcctcgttatatttcagcggtttatcatgatcttgaccgagcacctagtacgatgcgaaactgatgggacca

SEQ ID NO: 10 - DNA, 512 bp, Homo sapiens
cccttagcgtggtcgcggccgaggtactttaaacgtgctctgttctggtattataggatgaagaagttccagtttcaaattgtaatcctctccagaaggaagtttaaccaaagcagacaactctttttctgaaaattccacatttacatcattcttctgaacattcttgatcataagtgtaatgactacttgagattctgtttgataccagtcatacttgatttttgactgatgagtccacacctcagattctgagccattctgagcttcttgacaccttttaatccagacactgaaattagcatctgcactatctaatttttgtccttctgtaaaagtttctagggcagcagcatagtttttttcatggtattcacatattccttttctcagcatagcagtggaattatttggattgagttctagagacttctttgcatcagcaacagcaacacagtaattcccaagaagaatgtgacaataagctctttgacaataatactgtgcatcat

SEQ ID NO: 11 - DNA, 261 bp, Homo sapiens
  misc_feature 259: n = A,T,C or G
gcccttagcgtggtcgcggccgaggtacccttaaactggcaggacatttttgaaatcacaaatttgcacataaagaatgtcacgaacagccatgtatccatatacagtaatcaaataaggaacttatgacctaaagcaaaggtaaactttcttgaaacttaacattctataccaactaggcaacctctgcccaggatgagagttggatttttcaaaaacctctaatttaatagtgcagcatttcgttttccctgatggnct

SEQ ID NO: 12 - DNA, 320 bp, Homo sapiens
  misc_feature 221: n = A,T,C or G
cccttagcgtggtcgcggccgaggtactccagcctgggcgacagagcaagactccacctcaaaaaagaaatatttagcaaatattaaaggacaagagggaatatctgtttaaaaaattataatgcacgttagatgaaaagtaataggatgagatggttgttgctgaaatagcacttgctatataaattcaaacattccttttcaaattcagcttctcaganggttgacttcagatgcttgacactttcaacattatctttgcctttatccttctttatgcggataaacacaactgctaaaattataccaatcaccagaag

SEQ ID NO: 13 - DNA, 409 bp, Homo sapiens
cccttagcgtggtcgcggccgaggtacaaggaatgaaagtgtcacgggtaaaaactctaaaaggttaatttctgtcaaatgcagtagatgatgaaagaaaggttggtattatcaggaaatgttttcttaagcttttcctttctcttacacctgccatgcctccccaaattgggcatttaattcatctttaaactggttgttctgttagtcgctaacttagtaagtgcttttcttatagaaccccttctgactgagcaatatgcctccttgtattataaaatctttctgataatgcattagaaggtttttttgtcgattagtaaaagtgctttccatgttactttattcagagctaataagtgctttccttagttttctagtaactaggtgtaaaaatcatgtgttgcag

SEQ ID NO: 14 - DNA, 292 bp, Homo sapiens
ttcgcccttagcgtggtcgcggccgaggtttgacacatggataaacttttattgacctaccaaagggaaaaaaaccaatattcactgaaggctgccgaatctatattcctaagagtaaaggtgtttaattgactctccactcttaaaacactttgtatgaaatatagctaggaatatacataaagaattcagattacaaaactctccaggaaatcgatagtgatcatataatactggaactacagttaaaaacaaacaaaccaatctttgaggattcctaactgtagtttac

SEQ ID NO: 15 - DNA, 398 bp, Homo sapiens
  misc_feature 39, 73: n = A,T,C or G
cgcccttagcgtggtcgcggccgaggtaattccctgacncacattcatgtcaacatatgtagcaaattttgtnaaaacataacaatttgaagcttctgtaattttgagcactgctctaacaacaagcataatataaaattagttagattttgcaagtctacaaatgagctcttgcaacagaactcacagcctttttacttttttcccctaactttagcaatgtagtatcttgagccattaatttttgggtttttttaaaatccagaaggtatatagaaaccttttcagatttttcatctgatttgttcttgcagatgttcttctatcaaataccttattttaccttacagatatttgttgcacaggcagatactgctgtatttagacatttctatttc

SEQ ID NO: 16 - DNA, 283 bp, Homo sapiens
  misc_feature 33, 55: n = A,T,C or G
ccttagcgtggtcgcggccgaggtacagagcantataatctttactcttgagcangtcgttcaataacacgccggtaatcttccactagttcctgaaaactctcttccagctgttcatgttgcatgcttatttctatttggttcatctggtttgtcagttcttctggtctgagacattttctcatcttagcaagatctctctgctttttcttatatgggctaattagtcttcttttaatatccagctgtagcttctgtattgttcggcatcactcatgtcaag

SEQ ID NO: 17 - DNA, 278 bp, Homo sapiens
  misc_feature 255: n = A,T,C or G
cccttagcgtggtcgcggccgaggtttgagcgccagtttgagcgctttaaccaggccaacaccatcctcaagtcccgggacctgggctccatcatctgtgacatcaagttctctgagctcacctacctcgatgcattctggcgtgactacatcaatggctctttattagaggcacttaaaggtgtcttcatcacagactccctcaagcaagctgtgggccatgaagccatcaagctgctggtaaatgtagacgangaggactatgagctgggccgaca

SEQ ID NO: 18 - DNA, 127 bp, Homo sapiens
ttcgcccttcgagcggccgcccgggcaggtacaggtcagagtcttcttttcttttctttttgagatggagtcttgctctgttgccagactggagtgcagtggtgcgatctgggctcactgcaatctc

SEQ ID NO: 19 - DNA, 199 bp, Homo sapiens
  misc_feature 84, 109, 150, 153, 156: n = A,T,C or G
cgccctttcgagcggccgcccgggcaggtacaatttaatttttctgcttgcccaagaaacaaagcttgtgtggaaccatggaanaagatgaaaatgagactggcaaaanataaatgctgaatctgaagaagatttgggcaaataatctgnatnctntcaattgggaataagatggaaaatatgaatgctaaatcaaatt

SEQ ID NO: 20 - DNA, 312 bp, Homo sapiens
aattcgccctttcgagcggccgcccgggcaggtactccctgttttgagaaactttcttgaagaacaccatagcatgctggttgtagttggtgctcaccactcggacgaggtaactcgttaatccagggtaactcttaatgttgcccagcgtgaactcgccgggctggcaacctggaacaaaagtcctgatccagtagtcacacttctttttcctaaacaggacggaggtgacattgtagctcttgtcttctttcagctcatagatggtggcatacaccttttgcgggtctttgtcttctctgagaattgcat

SEQ ID NO: 21 - DNA, 349 bp, Homo sapiens
attcgcccttcgagcggccgcccgggcaggtaccacctacacccaacaagtcaatgagggacttctttttaatttggtaggattttgactggttttgcaacaataggtctattattagagtcacctatgacaaaaaataggggttacctagataatgccaaagtcggcatttgtcctgggttcccttgtgtgatctgtttggactatgttttcttttcttctcccacttgctcagcagcttgggcttccattctagttcttttaccaagatttttgtgtgaccatgttgacttcatttggattgccctctttcaatttccttgtgaaaacacccttaactttctcttta

SEQ ID NO: 22 - DNA, 376 bp, Homo sapiens
cgcccttcgagcggccgcccgggcaggtactatatacatttagtatatcgccccctacaggaagtctaaatacattttagaaaattttataatcaaaaaaaaggatgaatgatttattttatttatctgacaaaaattcagccctaggctattgacagctgcagttctcctatccacttccacataatttttaaaatgtgaatgccaggaatggtgctgttgatatgaatattaggacaaggagcagacgtttcatcaggactaggtgtctctggcggagtctgtggaggaataaacaaagatactcgtgcaatgttggatatttctgatttcagatcgaccttatcaacagcctgaatagcaatgaaaagatctg

SEQ ID NO: 23 - DNA, 337 bp, Homo sapiens
  misc_feature 39, 41, 70, 74, 75, 76: n = A,T,C or G
ttcgccctttcgagcggccgcccgggcaggtcagccagntnaggctacactatcccaggatcagcatggncgtnnnccagtgggtaatcgccctggccttggctgccctccttgttgtggacagggaagtgccagtggcagcaggaaagctccctttctcaagaatgcccatctgtgaacacatggtagagtctccaacctgttcccagatgtccaacctggtctgcggcactgatgggctcacatatacgaatgaatgccatatctgcttggcccggataaaaaccaaacaggacatccagatcatgaaagatggcaaatgctgatcccacaggag

SEQ ID NO: 24 - DNA, 608 bp, Homo sapiens
ttagcgtggtcgcggccgaggtgaagttattatctcgaactgacactgagccacaacccaaacaacccagctctccctaagcttcaaactagactacttctccataatattcatccctgtagcattgttcgttacatggtccatcatagaattctcactgtgatatataaactcagacccaaacattaatcagttcttcaaatatctactcatcttcctaattaccatactaatcttagttaccgctaacaacctattccaactgttcatcggctgagagggcgtaggaattatatccttcttgctcatcagttgatgatacgcccgagcagatgccaacacagcagccattcaagcaatcctatacaaccgtatcggcgatatcggtttcatcctcgccttagcatgatttatcctacactccaactcatgagacccacaacaaatagcccttctaaacgctaatccaagcctcaccccactactaggcctcctcctagcagcagcaggcaaatcaagcccaattaggtctccacccctgactcccctcagccatagaaggccccaccccagtctcagccctactccactcaagcactatagttgta

SEQ ID NO: 25 - DNA, 234 bp, Homo sapiens
  misc_feature 23, 61: n = A,T,C or G
ggtcgcggccgaggtacttccanaggggcaggatatgcaaatgtggatggtttacagttcnatttatactgaactttcggcatctttaagtccttgttaaggccaatgacacaggtaggggtataagccaatgacaggaagtgtgaaagaggaaaccagaaccaaaactgggtaaatacaaggacgccaaccacagaaggcatatgagtatgcccagtcctggactgcagggaa

SEQ ID NO: 26 - DNA, 302 bp, Homo sapiens
  misc_feature 39, 69, 73, 76: n = A,T,C or G
cgcccttgccgcccgggcaggtacaggtttcactattanaaatatatgatgttaaactaacaaactcgngacnttnaaagatgtcttcgtcccacgcacacacatttgtaatttatgtccatttgctatttcccttcttctataatcttcaaattatatagttatgcattgagttccctatgcatctcacccatctcctttatctcagccttctcatactttgccattctcttctttctggaaataaccagcacaacaattccagcaacaactgctatcaccacaaccacaataacagcaat

SEQ ID NO: 27 - DNA, 294 bp, Homo sapiens
cgcggccgaggtacttcctgctctaataatgtcttctttaaacggaatccagcataaaagggattgaaatgtataaggtcatgatgcaaatgctttggagatagtgaaactgatctgcacaacatggaaaaagatgtcatgtgcacagaagttctgcaaggattcactgagccatctgggcttccatggcttgtgctgtccattctggtgctgtttgactaattttctccaaaaggttattcacttggaaacaaagtgattggatctgcttatcccacgttggcagggcttctc

SEQ ID NO: 28 - DNA, 180 bp, Homo sapiens
  misc_feature 18, 19, 20, 21, 40, 126, 138, 146, 150, 172, 178: n = A,T,C or G
ttcgcccttagcgtggtnnnngccgaggtaccagcggctnatggacatcaagtcgcggctggagcaggagattgccacctaccgcagcctgctcgagggacaggaagatcactacaacaatttgtntgcctccaaagncctctgangcancaggctctggggcttctgctgncctttnca

SEQ ID NO: 29 - DNA, 188 bp, Homo sapiens
  misc_feature 9, 33, 147, 158, 159: n = A,T,C or G
tcgagcggncgcccgggcaggtacagctggtgnttctgccttaccccatcctctcctctcagattcaccgaggactgttcaggtggtaacattctcttagggtagggaactctgcagagggagagctgaggaggttccggccatagntgtttgtaatnntagggctctgggcttggctgaaacatgac

SEQ ID NO: 30 - DNA, 175 bp, Homo sapiens
  misc_feature 12, 16, 39, 40, 76, 135, 157, 165, 175: n = A,T,C or G
ttcgccctttcnagcngccgcccgggcaggtggcccttnnccgaaaaaatttgcctattcttgtgacagggttatnaggaaaataacaaaatccattctctgttatacactcattctgcagaaacactcaatggntgagatcctatatagttctggncccaaacnaatcttcccn

SEQ ID NO: 31 - DNA, 271 bp, Homo sapiens
  misc_feature 142, 214, 216, 217, 229, 247, 263: n = A,T,C or G
aacaaccgactaatcaccacccaacaatgactaatcaaactaacctcaaaacaaataataaccatacacaacactaaaggacgaacctgatctcttatactagtatccttaatcatttttattgccacaactaacctcctcngactcctgcctcactcatttacaccaaccacccaactatctataaacctagccatggccatccccttatgancnnggcgcactgatnataggctttcgctctaanattaaaaatgccctancccacttc

SEQ ID NO: 32 - DNA, 173 bp, Homo sapiens
  misc_feature 108, 113, 114, 158: n = A,T,C or G
aacttcatcgccctctgatcgccgatcacctctgagacccaccttgctcataaacaaaatgcccatgttggtcctctgccctggacctgtgacattctggactatttntgtgnntatttgtggccgagtgtaacaaccatataataaatcacctcttncgctgttttagctga

SEQ ID NO: 33 - DNA, 130 bp, Homo sapiens
  misc_feature 34, 64, 71: n = A,T,C or G
tttgtcaaattggaacaaggaaacagaaccacanaaataaatacattggttaacatcagattanttcaggntacttttttgtaaaagttaaagtagaggggacttctgtattatgctaactcaagtagac

SEQ ID NO: 34 - DNA, 298 bp, Homo sapiens
  misc_feature 3, 12, 21, 24, 25, 69: n = A,T,C or G
tancgggggccnggccgaggnacnnaactcagatgaaaaaagaaattaaattttagctttctggagagnatcccctctctggcaccatcaaacacttctttgtttcccttcaacttggaactcttcaaacatcaggggttgtgagggtttggccattcttttatcttgggtccatgtgagtgacagaaatggtgcggcctgggaaagatctccctcctttacattttctcttctccctcctcctccttattctaaaactgtgcctccaacagaggggcaggggctcttgtagagagat

SEQ ID NO: 35 - DNA, 297 bp, Homo sapiens
  misc_feature 1, 19, 37, 43: n = A,T,C or G
ncgcggccgaggtacttanagcataaaatgcaatcantaaatntgatgctcttaagtgtgtttcttaagatgacatcaaaaacctctagatagcatggaaatttcccggtttaaggctttccaataggtttgtagcaagcatcaggttgccagaggcgaatatcaacaagaacttgattgagtttttgcatccagagatcccgctcttctttagtatctgcagacagccagttcttggtaacacagagtgtgtccctgcattggctgacaagagtctctcggcatcttctctttgtg

SEQ ID NO: 36 - DNA, 382 bp, Homo sapiens
cgcggccgaggtattttatcccatggaaccactaaaaacaaggtctgctctgctcctgaagccctatatgctggagatggacaactcaatgaaaatttaaagggaaaaccctcaggcctgaggtgtgtgccactcagagacttcacctaactagagacaggcaaactgcaaaccatggtgagaaattgacgacttcacactatggacagcttttcccaagatgtcaaaacaagactcctcatcatgataaggctcttacccccttttaatttgtccttgcttatgcctgcctctttcgcttggcaggatgatgctgtcattagtatttcacaagaagtagcttcagagggtaacttaacagagtatcagatctatcttgtca

SEQ ID NO: 37 - DNA, 492 bp, Homo sapiens
  misc_feature 70: n = A,T,C or G
ttcgcccttgagcggccgcccgggcaggtacacattaagcatccccagttcccctcgcacaccccttttnccagccactagtaaccatccttctactctctatatccatgagttcaattgttttgacttttagatcccgcaaataattgagaacatgcaatgtttgtctgtttctggcttatgtcacttaatatagtgacctctagttccatccatgactccttaactgcccctgaatttttgacactattatttttaagtattttggaaaactcacatctgttctcatttttaaaccttaataataacaatttcctactaagctaataaaacttccccttatattatttgtaatgtgtgcataacatagtacctcggccgcgaccaccgctaagggcgaattctgcagatatccatcacactgggcggccgctcgagcatgcatctagagggccaattcgccctatagtgagtcgtattacaattcactgg

SEQ ID NO: 38 - DNA, 315 bp, Homo sapiens
aattcgcccttagcgtggtcgcggccgaggtactgaataaaaaaataagtgttaagttcttgaccttttaaattagaattttataaagtgcttttcataaagtcttatatattatagtaattaagtggatataatttccttaacaaaggcaccttgaaaagttattggcacatgagattttgtctggtcttttttttttcttttgataatttcaaagtctcttcacatgtgttctcttccactttaagttttccttaacaattcatcatatgaatagccagcccttttagagaataaggtcaacttttttttttt

SEQ ID NO: 39 - DNA, 173 bp, Homo sapiens
  misc_feature 69, 70, 71, 90, 144, 173: n = A,T,C or G
ttcgcccttagcgtggtcgcggccgaggtacagaactccgcattgaagtctaaaaaatcaagactcctnnnacttacttggtcttggagnttggcttttcttacagtggtccccctgaagtaaatgtccatgtaataaagaganctcaagttcctcttgataacccacctgtn

SEQ ID NO: 40 - DNA, 167 bp, Homo sapiens
  misc_feature 40, 139, 142, 143, 144, 166: n = A,T,C or G
tcgcccttagcgtggtcgcggccgaggtacaatattacancgagaaaaaccctaaaaaatttataaaatgaatgatattacactatcaaataaaaagacaagtcattttgttttcatgagatttcaaggttgatttgantcnnnttcccccggaactgcacggagnc

SEQ ID NO: 41 - DNA, 245 bp, Homo sapiens
  misc_feature 198, 200: n = A,T,C or G
ccttagcgtggtcgcggccgaggtacttctaactccatcttgaaagctgcttcctggaagatccaaacggacacaaggagggactgaaggattagaatgagggaagtaacccatgcactgcttatttgagatggggaaccgaaggactttggcagttcctacacagagacagatggcagagatgacaaggtttctcananaatgcgtgagtaactggaatggcttttcctgatgacccaaacagc

SEQ ID NO: 42 - DNA, 447 bp, Homo sapiens
ccttagcgtggtcgcggccgaggtactttcctagatgacatatcgagtcaacatgaagccttagctaaaatgaatgattcaggatattaatgagaaattctcacaaatgatatgcatttaggaaatgattttgctttccttaaatagttcgaaggcttgaaaataaacttttttttgcatttcttttagaatgtttggtcattaacaacttttaaccttatcttcctcttctccttagcccttaacagaccgagtccattctatttggaaataacaagaacttgatcagattattaaatcttggaaacctcatttttaccttataaagtgttaagtttcacgtgcatattctcttacaaatgtagtataaatgttatggatagatataaggaaatattggcatagtataggtaattagtgaaaagacacaacttcacaaaacataat

SEQ ID NO: 43 - DNA, 396 bp, Homo sapiens
cgccctttcgagcggccgcccgggcaggtacatttgtttatttaaagcacaggaaatgaataaaatgccacctaaaaagtatctgcaatgaataaattatttccagtgaagcactgcagatccacacacaccagtctgctaacctttaccaaggccatgtccggtgggcttgtgcttgtcccagttgactcttccttgagacctttcccttctgtgcaatgaccacagcattagagaccagtcctgcatgcgctggccttcctcgtaggcatggcagaccacgtggatgagcagtgggctggcatgcagtaggcttcaacaaatggcacttcactgtttccagtgaccctgaaatgttttatgtaagtggggcctgggctttaaagaaaagagcca

SEQ ID NO: 44 - DNA, 447 bp, Homo sapiens
cgcccttcgagcggccgcccgggcaggtacaaaaaaagtgccctcactcaaatgagcaaattacatgcaaaatattagtgatatcatttaatatcctagagctcaatgcagtcaaaccgcaataaaagtggtttttataggtaaaagtgatttcatctcttaagatctgaatgtcgagaacttttttacaagttccatatacatgatacacagttgcagccaaccacaaattaaacaccataaaaaaagttaaaatgaaaacacagaacatacttaattttttattttgaaattccctattccctctatacaaggacctttgctgaaacagtttccacaaaggcagcagtgaattttcagaacatttacattttttccccctcagcaaaaagataaatcacagtgtaaattatgttgttctgctgtcatctttggctggggttagac

SEQ ID NO: 45 - DNA, 422 bp, Homo sapiens
  misc_feature 71: n = A,T,C or G
ccctttcgagcggccgcccgggcaggtacaccatacatgtcatctactgatccaactatgctatctgatantctatacttacaaagaatggttccaacaaacacctttgtagaacaaatattcacactgtgttatcaaatttgctgctcctccagtggcggttcaagagcttccattagctttttatttgcctcttcattatgccggctttgacaatgagttaaatgtttcttaaaacctcttgggaaatttgattcaaaattacaacgtggacatttaagtaaactttgcccatgggctgctacatgatttttaaggagagattccaaaagaaaagcctttccacagattgtgcatttgtaagggctatgaacattatgcttattaaccaaatgatgcaaaacagcaccttttttcatagc

SEQ ID NO: 46 - DNA, 134 bp, Homo sapiens
  misc_feature 12, 77, 78, 79, 122, 124, 130: n = A,T,C or G
ttcgccctttcnagcggccgcccgggcaggtacttctacacatctgcctaacttgggaatgaatgtgggagaaaatnnntgctgctgaaatggactccacaacaagaaactgtttctccagncnactttnaacc

SEQ ID NO: 47 - DNA, 224 bp, Homo sapiens
  misc_feature 8, 9, 13, 15, 32, 36, 67: n = A,T,C or G
gccctttnnagcngncgcccgggcaggtacangccnttgtccccaagacagcatggagcaacctgtnacaaagcagggaatctccttaaagtcatgtcttcccaaaaagattaaactacccaggctggcccttcaccccagtcctccacgttcatttcctttaaaaaaaaattatgattttttttttcaacataaaagtttgagtaggctgggtgtggtggctc

SEQ ID NO: 48 - DNA, 143 bp, Homo sapiens
  misc_feature 24, 59, 60: n = A,T,C or G
ccgcccgggcaggtaaaaaattanccggatgtggtggcgggcgcctgtagtcccagctnntcgggaggctgaggcaggagaatggcgtgaacctgggaggcggagcttgcagtgagccaagatcgcgccactgcactccagcc

SEQ ID NO: 49 - DNA, 124 bp, Homo sapiens
  misc_feature 16, 18, 108: n = A,T,C or G
attgccgcttctccantnccgccttcacatctatttgctgcctcagcttgccagactttttcaccggtgctggggttgaactctgctcttctgatgcttgaatcgagnggggtggattagcaga

SEQ ID NO: 50 - DNA, 112 bp, Homo sapiens
  misc_feature 45, 46, 70, 99, 102, 111: n = A,T,C or G
ttcgcccttagcgtggtcgcggccgaggtaccacagatttgtttnnataacaataaatcttcacttcttnggattatgatttccctaaacaaaaagctngantaattgatnt

SEQ ID NO: 51 - DNA, 246 bp, Homo sapiens
  misc_feature 38, 47, 71, 72: n = A,T,C or G
cccttcgagcggccgcccgggcaggtacattagatttncttaatcantgaggaaattagtatagcactaannttgttatttcagctaaaaagcaaaacaaaaactcccttgactcctcagatggcctatgtagacccatgatgtccttgagtaagtcatggtggttcctgttgaattcttggaagcaatgataaaagcttgtgctgtcactttcttacagggccctcaggttcatggtggggccaa

SEQ ID NO: 52 - DNA, 453 bp, Homo sapiens
cccttcgagcggccgcccgggcaggtacatgatgaagcacttacaatagtgtctggcacatacaaatactctgcaaatattgcttattatcataagtctctaatattctgacatctgaagcctttggggttctaaattagctgttttttatgctgcccacttaaggtgttttttatttttcaacgtctctgatctttgattgtgagctcatatttggaggatctttgggaatcctgaggctctaaatttgggaaattttcctccagaccatctgcaatttgagaccacatttactgccatcagttatccctgcttcatgtaggagccctggttcagctcccttgtcttcagcatgtccaggtttagctccactgccagccttcatataggactcgacacaagattttagtgtattgctcccagatcatcaccttagtttccactcacagttct

SEQ ID NO: 53 - DNA, 110 bp, Homo sapiens
  misc_feature 43, 71, 73, 78, 81, 96: n = A,T,C or G
ttcgcccttcgagcggccgcccgggcaggtggctgaactcatnctgaagccaacagatgcccctgtaggantnggacnttnggagccaggggagangggcattatctgct

SEQ ID NO: 54 - DNA, 354 bp, Homo sapiens
  misc_feature 12, 70, 71: n = A,T,C or G
attcgcccttcnagcggccgcccgggcaggtacatttttaggtaatatttgattaaaaacaaacacggtnngaacagtgtctgaattccaataataaaatattggctgccctaaaagcagtttgattgcaaagcaaattacagttagaattccagtaagggactgtaattggcatttaaaagagcacaatataagagttagaaattctaatttagctcactatttagtaaagattagcattttagcaaattatcttatgtgctgctttagtcaaatgtaaattcagacttgggctaacattgaatatataaaaaagcatatactgtgttatatattgctaaagagtagattttc

SEQ ID NO: 55 - DNA, 196 bp, Homo sapiens
ttcgcccttagcgtgtcgcggccgaggtacagagaaatcatttggatggatctatttacagtcttttctgattatcatttccactggccaaatatatttcacagaatagtcaacactgacttgaattgatcaccattataatcgggcttttactcctcctcccccctttcaaagatgatgatcccattttaacaga

SEQ ID NO: 56 - DNA, 249 bp, Homo sapiens
  misc_feature 200, 213, 230: n = A,T,C or G
ggccgaggtacttcaagtgtctaatctatcctctcaacacctccataaattatatatgcaaagcgtaaaatatttactccctggaaaaacgtttgccaatccctggtttagatccttgaaaatttagaacatcttataattatatagcactttacaatatacaaagcaccttggcatacatcatcacatttaatctttgntttgtaggggggnaggcattcatgcattgnaaaggagaaagctaaaact

SEQ ID NO: 57 - DNA, 442 bp, Homo sapiens
  misc_feature 1: n = A,T,C or G
ngatcccccctcggtggtgtcatcacaaactatctgcttgagaaatcccgattagtgaagcagctcaaaggagaaaggaacttccacatcttctatcagctgctggctggagcagatgaacagctgctgaaggccctgaagcttgagcgggatacaactggctatgcctatctgaatcatgaagtatccagagtggatggcatggacgacgcctccagcttcagggctgtacagagtgcaatggcagtgattgggttctcggaggaggagattcgacaagtgctagaggtgacatccatggtgctaaagctggggaacgtgttggtggctgatgagttccaggccagtgggataccagcaagtggcatccgtgatgggagaggtgttcgggagattggggagatggtgggcttgaattcagaagaagtagagagagctttgt

SEQ ID NO: 58 - DNA, 751 bp, Homo sapiens
  misc_feature 2, 7: n = A,T,C or G
gntgggnccgagctcggatccctagtaacggccgccagtgtgctggaattcgcggccgcgtcgacgaccgttgactattctctacaaaccacaaagacattggaacactatacctattattcggcgcatgagctggagtcctaggcacagctctaagcctccttattcgagccgagctgggccagccaggcaaccttctaggtaacgaccacatctacaacgttatcgtcacagcccatgcatttgtaataatcttcttcatagtaatacccatcataatcggaggctttggcaactgactagttcccctaataatcggtgcccccgatatggcgtttccccgcataaacaacataagcttctgactcttacctccctctctcctactcctgctcgcatctgctatagtggaggccggagcaggaacaggttgaacagtctaccctcccttagcagggaactactcccaccctggagcctccgtagacctaaccatcttctccttacacctagcaggtgtctcctctatcttaggggccatcaatttcatcacaacaattatcaatataaaaccccctgccataacccaataccaaacacccctcttcgtctgatccgtcctaatcacagcagtcctacttctcctatctctcccagtcctagctgctggcatcactatactactaacagaccgcaaccttaacaccaccttcttcgaccccgccggaggaggagaccccattctatacca

SEQ ID NO: 59 - DNA, 292 bp, Homo sapiens
gatccactagtaacggccgccagtgtgctggaattcgcggccgcgtcgactggacgggctcctggtggctgtgctgctgctgtgagcgggcccctgctcctccatgcccccagctctccggctgggtgggcttggccatggtcagcgtgaacgcgcccctcggggctccagtggagagttcttacgacacgtccccatcagaaggcaccaacctcaacgcgcccaacagcctgggtgtcagcgccctgtgtgccatctgcggggaccgggccacgggcaaacactacggtgc

SEQ ID NO: 60 - DNA, 540 bp, Homo sapiens
gatccgaggacccaaagggcagaagggagaacccggcttacccggccatcctgggaaaaatggccccatgggaccccctgggatgccaggggtgcccggccccatgggcatccctggagagccaggtgaggagggcagatacaagcagaaattccagtcagtgttcacggtcactcggcagacccaccagccccctgcacccaacagcctgatcagattcaacgcggtcctcaccaacccgcagggagattatgacacgagcactggcaagttcacctgcaaagtccccggcctctactactttgtctaccacgcgtcgcatacagccaacctgtgcgtgctgctgtaccgcagcggcgtcaaagtggtcaccttctgtggccacacgtccaaaaccaatcaggtcaactcgggcggtgtgctgctgaggttgcaggtgggcgaggaggtgtggctggctgtcaatgactactacgacatggtgggcatccagggctctgacagcgtcttctccggcttcctgctcttccccgactaggg

SEQ ID NO: 61 - DNA, 212 bp, Homo sapiens
gatcctcgggtcccttgacgctctacccatggaggaggaggaggaagaggataagtacatgttggtgagaaagaggaagaccgtggatggctacatgaatgaagatgacctgcccagaagccgtcgctccagatcatccgtgacccttccgcatataattcgcccagtggaagaaattacagaggaggagttggagaacgtctgcagcaatt

SEQ ID NO: 62 - DNA, 751 bp, Homo sapiens
  misc_feature 14, 73: n = A,T,C or G
cggcgcggagctcngatcccatgggcttcttgaatgcatatatgggcttcatcaactccttctgagctggaangagtagcttccctgtattacctcccctactcccttatctgttgtgtattccacttaggaagaaatgcccaaaagaggtcctggccatcaaacataattctctcacaaagtccactttactcaaattggtgaacagtgtataggaagaagccagcaggagctctgactaaggttgacataatagtccacctcccattactttgatatctgatcaaatgtatagacttggctttgttttttgtgctattaggaaattctgatgagcattactattcactgatgcagaaagacgttcttttgcataaaagactttttttaacactttggacttctctgaaatatttagaagtgctaatttctggcccacccccaacaggaattctatagtaaggaggaggagaaggggggctccttccctctcctcgaatgacgttatgggcacatgccttttaaaagttctttaagcaacacagagctgagtcctctttgtcatacctttggatttagtgtttcatcagctgtttttagttataaacattttgttaaaatagatattggtttaaatgatacagtattttaggtatgatttaagactatgatttacctatacattatatatattttataaagatctaaaccagcatacccttactctgccagagtagtgaagctaattaaa

SEQ ID NO: 63 - DNA, 668 bp, Homo sapiens
  misc_feature 16, 47, 53, 56, 58: n = A,T,C or G
gatccctagtaacggncgccagtgtgctggaattcgctctttcgcgnggcacntanangatggattatgattccagcaggcaaatctgcatattaaatatagacaacccaaccacagtatctgaacgttaaaagaaatctatcacgacagacattttacctagttataaataacgtaacaatagatcacactcagatttcttaaacagctcactcaggagtttcctcttttaaaaattaaataacttatggtacctcacacttatagcacatacacagttcatagctgaaacagcttcttaaaagcagaatgcacaatcacattgactttttcagcttctaaaagcttctttgtagatattaaactgccctcactacaaggcagtatgaacaagaactggattctgattctggtggcaacacaataactataaggcagtaagaacaagaactggattctgattctggcagcaacacaataactaaaacaccattcaccacatgacaaaacaaacaaatccaatgacaaaaaggaatcggaaaaaaagcagcaacagaaacagtatgtggcaatcattcacataaggcccctcttccaccataccttatgatatacatcccttatagcatgacaatgtaccccaaggcacctgaggcctcataatacca

SEQ ID NO: 64 - DNA, 891 bp, Homo sapiens
  misc_feature 1, 14, 77, 644, 665, 668, 690, 750, 763, 768, 811, 824, 826,859, 876: n = A,T,C or G
naagacgcgattgnagaaaactgctaacatttttaaaaggctagaacatcctttgacttcttgaaaatctgcatgtntggcttgggttttattaccacatgcctgagttcttcaagaatggaaggctcaagtattctcatcttccatttgccaaacttccttcctgatttgagtcacatgttccacttggaaagaaagggaacagagagcctcctccatggacagtgtatgaatttcattgggaatcttgctctctcccgcctctatgcctttctctctttttaaccttactttacataatattatagatgggccaagaaaagaaaagatgacataacattttgatgaatttcacctattccattcttcacgtttcagaattggtcgactttgttagaagataattgaagtagccttgggtcaaaagcaaccttttcaattgtgatcatacctaaaacatataaaaaccctgccgtagattaaaagcaattataaaatcataaaattgaatgtttgcagaatcctggagcagtagatttctttgtctttggcctgcggactagaaagagggcagcagtagtatgctggagcttcctgggataccagccacatggtttcttttcattagatctgatttttgtttnccctgtagatctgatttttgnagntgaaaacattttacccccctcnaaccctatttctgaatattgggcctttttataccctagccctagaaggaaaaacccggangcccattctttantttcnaaaaaaaattcccccccccatttccttaccctttggaactggntttttttctttangnaacctttaaaaagggcccaaaaagggggggccnattttttaaaatttttncaaaaaaaaattttt

SEQ ID NO: 65 - DNA, 536 bp, Homo sapiens
  misc_feature 535, 536: n = A,T,C or G
gatccctagtaacggccgccagtgtgctggaattcgcggccgcgtcgacagccgctcgtcagactccagcagccaagatggtgaagcagatcgagagcaagactgcttttcaggaagccttggacgctgcaggtgataaacttgtagtagttgacttctcagccacgtggtgtgggccttgcaaaatgatcaagcctttctttcattccctctctgaaaagtattccaacgtgatattccttgaagtagatgtggatgactgtcaggatgttgcttcagagtgtgaagtcaaatgcatgccaacattccagttttttaagaagggacaaaaggtgggtgaattttctggagccaataaggaaaagcttgaagccaccattaatgaattagtctaatcatgttttctgaaaacataaccagccattggctatttaaaacttgtaatttttttaatttacaaaaatataaaatatgaagacataaacccagttgccatctgcgtgacaataaaacattaatgctaacactttttaann

SEQ ID NO: 66 - DNA, 239 bp, Homo sapiens
gatccatctggagagacacgtcaccgtgttcagatagcctgtgtggccaatgtggttggtcttcagcttgcagttagccaggttccataccttgaccagcttgtcccagccacaggagacgatgatagggttgctgctgttgggcgagaagcggacacaagacacccactctgagtggctctcatcctggacagtgtatttgcacacacccagggtattccatagcttgatggttttat

SEQ ID NO: 67 - DNA, 779 bp, Homo sapiens
  misc_feature 5, 9, 754, 779: n = A,T,C or G
agctnggtnccgagctcggatccaaataataagtgacttctctaccaaagcatagaagattcttcatatctccttccagtggctcaatttagattttgggaaggagcagaacaagtgaaacacagaaaactgaagagaagaaatcctcattttggacctatatttctccttgactatttcttaatatccatcctacccatcgttctaatgttttaactttgctctgaatttataaatagtaaaggccaaagacatagaatatacatttagtagctttataccaagaaatttgccttgaaagctgctgttcgtggagggaaaagtgtagcaaattcctgtctatttttattttttatttttttttaacaaagacaagatttatgtccctagattttgaaggttaaggcaaatataaatacatatctgcacactattttttagcagttgcatgagtaagagtaatgagatttgtattttaaggactttgtcatgtggatgttttggagttgactgctcagatcttttatagggctttaatatttttgatctattaccttgatgacattatttgtccacacttgagcccatctgtctttctagctatgaccttgttatgaacagtatttgcactcggtgcaaatatccatgtcttacctaattaagcaacatcatagtgccataactcaaggaagttgaatgaggtgaacatagatacagctctttccccttccccccctttttaaatgtaacaaanaccttttatgttccccttccccctn

SEQ ID NO: 68 - DNA, 814 bp, Homo sapiens
  misc_feature 796, 805: n = A,T,C or G
gatccaaaggtaatccaatgtcttttaaattaagcttgtgacaattaaaccaatacactgtagcaatgagaaaactattgacaaagtataaccagggaatattcatctcaatatatgctggaatctgaactttaagtaaaacaatgattacctgaagtagtacaaatggtaaccaggtactgagaaaacagacaatgagcttggataagaatatttttttagatctcacagtataactggagtgggatgaaaaaggaaaatataagatagtttcattcatataggaagttatcctgatagcctgtaccaaagtagtaacttcttcccaacaggttatgaaagctacaaataaaatcatcaccatgaaaaatgacagccagtaactctgaatgctgacatagaaaggacagtgacgagaataagcattctgtgccttcaggctttggtagatggctgggtctcccaaaacataagcaaggactgaaatccaaattaaaattactgtaaagaaataaaataatttttgacacttaaatgaaagcttggttgttttagagaaattcaggcaataatctatacaagctgtcaggaaaactggataatgcaaaaagccataagtaaaggaaataatttgagtaaataggcagatgtggtatttagtgaacctaatgcttaaaagtacaaaatccctgaaatacaatataatggaaatgtttaccaaaagtaaaagatcaacgaatgctagtgaaatgcaaaaatattccattaaaatttttgacagggggtttttcttctnattcctagngtaaaggat

SEQ ID NO: 69 - DNA, 239 bp, Homo sapiens; identical to SEQ ID NO: 66

SEQ ID NO: 70 - DNA, 805 bp, Homo sapiens
  misc_feature 719, 725, 803, 804: n = A,T,C or G
gatccctagtaacggccgccagtgtgctggaattcgcggccgcgtcgacctgaagatcctggtgtcgccatgggccgccgccccgcccgttgttaccggtattgtaagaacaagccgtacccaaagtctcgcttctgccgaggtgtccctgatgccaagattcgcatttttgacctggggcggaaaaaggcaaaagtggatgagtttccgctttgtggccacatggtgtcagatgaatatgagcagctgtcctctgaagccctggaggctgcccgaatttgtgccaataagtacatggtaaaaagttgtggcaaagatggcttccatatccgggtgcggctccaccccttccacgtcatccgcatcaacaagatgttgtcctgtgctggggctgacaggctccaaacaggcatgcgaggtgcctttggaaagccccagggcactgtggccagggttcacattggccaagttatcatgtccatccgcaccaagctgcagaacaaggagcatgtgattgaggccctgcgcagggccaagttcaagtttcctggccgccagaagatccacatctcaaagaagtggggcttcaccaagttcaatgctgatgaatttgaagacatggtggctgaaaaagcggctcatcccagatggcttgtggggtcaaagtacatccccatcgttggccctctggacaagtggcggggccctgcactcatganggcttncaatgtgctgcccccctctttaatactcaccaataaaattcttactttctgaaaaaaaaaaaaaaaaaaagggggggnnc

SEQ ID NO: 71 - DNA, 901 bp, Homo sapiens
  misc_feature 4, 648, 733, 759, 761, 765, 800, 802, 804, 848, 869, 897: n = A,T,C or G
gatncaggggcatgctcactcttcacttgtatcaactcaggctctgtgcttctcgactccgtacggtccacgtaattttggaggagtcctgcccccagagcgtcaccttctacattgaggacggtacaggaccggtcgactagccagtccacagccaggatcaaggagatatggtcgaccgggaggttgactgcttcgaggatgatggccagagtgaggacacctccagcagggatgcccgctgcccccacgctggacgctgtggccgtgaccaggatggtgatgatctttacgaagtccaaggactgctggctgagctgtgcaatgaacactgcggccacgcactggaagagcgcggcaccgtccatgttgacggtggcgccgatgggcaggatgaaacggctgatgtgcttggccacgccattattctcctccacgcacttcatcatcagcggcagcgtggcggaactggaagaggtcccaaaggcagtggccagcggcgtcacgatgccccacaggaagcggtaggggtttttgcgggtgaagaggaagtagatgaggggcagtaccaggagcccatggatggcgtgacccagcaggcagcacagaatgtacttgccaaggcgggcaaagaagtaaacccacatnctccatctccacgatcttgccagccaccaggaacatgatgcccacaggggcgtaccacatgatccaggagaaccagaaccatggngggcttattgaaggagtttgaaaaancngatnaacaagcttccctttagggcccagctttccgcagngncnccccaaagacgatggcaaacacttcccaagccccaggatgtttnatttccctttcaccttcttgnccccacggggaaccttttacccttgggnttct

SEQ ID NO: 72 - DNA, 636 bp, Homo sapiens
gatccggaagtctccatttacccaaaaatgcaagagccatgatcagtcatggcgacactgcaggcggtactgagtgaccatgtccagtccggctccgtccctcccacacgggggacaagcttctccgaggaggcctggccaaggtggaacaaataccctgatgtcgaaaaatgtctaaaaatcccacagacggaattttcaaaaagaggagaaacctcccgcgggagggaggcagcgagactccgaacacggtagcaagcactctggacagactcatgtatgaaaaagtacatcatggtccttgtacgtctctcccagtttatcccaaatgggagccaactgtttgcagtgaccacaccatggggcatagaactccacaaagacgttttttttctcatcaaaagccacgtcttcaaagttcttcccaacaagcaccttgacaggctgcttgtcccagtcctccggcagctcctggctcatcaggtggggcttgattttgccctccaggaagcggtggcagaactctgtgatcctctctgccgtcagctcctccgattcgggcttgtacttggtcatctcctcctccagggtgatgaggcgcacggccgggcactcttccttcttcaggccaaagaa

SEQ ID NO: 73 - DNA, 238 bp, Homo sapiens
gatcctctggagagacacgtcaccgtgttcagatagcctgtgtggccaatgtggttggtcttcagcttgcagttagccaggttccataccttgaccagcttgtcccagccacaggagacgatgatagggttgctgctgttgggcgagaagcggacacaagacacccactctgagtggctctcatcctggacagtgtatttgcacacacccagggtattccatagcttgatggttttat

SEQ ID NO: 74 - DNA, 824 bp, Homo sapiens
  misc_feature 696, 714, 754, 760, 763, 805, 812: n = A,T,C or G
gatccgttctctgcgatgacataatatgtgacgatcaagaattagactgccccaacccagaaattccatttggagaatgttgtgcagtttgcccacagcctccaactgctcctactcgccctcctaatggtcaaggacctcaaggccccaagggagatccaggccctcctggtattcctgggagaaatggtgaccctggtattccaggacaaccagggtcccctggttctcctggcccccctggaatctgtgaatcatgccctactggtcctcagaactattctccccagtatgattcatatgatgtcaagtctggagtagcagtaggaggactcgcaggctatcctggaccagctggccccccaggccctcccggtccccctggtacatctggtcatcctggttcccctggatctccaggataccaaggaccccctggtgaacctgggcaagctggtccttcaggccctccaggacctcctggtgctataggtccatctggtcctgctggaaaagatggagaatcaggtagacccggacgacctggagagcgaggattgcctggacctccaggtatcaaaggtccagctgggatacctggattccctggtatgaaaggacacagaggcttcgatggacgaaatggagaaaagggtgaaacaggtgctcctggattaaagggtgaaaatggtcttncaggcgaaaatggagctnctggacccatgggtccaaaaagggcttcctggtgagcgangacggncangactttcttggggcttgcagggggcttcggggtaatgacggnggctttnaaacattgcctt

SEQ ID NO: 75 - DNA, 392 bp, Homo sapiens
  misc_feature 382, 391: n = A,T,C or G
gatccctagtaacggccgccagtgtgctggaattcgcggccgcgtcgacaggagcctggcctggggagggcttgggcctgtgaggattctccccgaaggtgccctcggaggcagcaggtttgaggccctggggggcccgttccccagaagctgccagtgctttcagatgcattgactcttcccgcctcccctccctcagaaaggtagtgcccacactatttttaaaatgttattttatgcaatacactgttcctagtgagcagggctctggccctgaggagtctttgcaatgtattgaaggaattgctgccgtgtgagttttgaatgattttgcagtaaagacctgatctttctcaaaaaaaaaaaaaaaaaaaaaaaaaanggggggggnc

SEQ ID NO: 76 - DNA, 878 bp, Homo sapiens
  misc_feature 745, 793, 812, 865, 875: n = A,T,C or G
gatcctatatgtgccaagcccataactcagccactggcctcaataggaccacagtcacgatgatcacagtctctggaagtgctcctgtcctctcagctgtggccaccgtcggcatcacgattggagtgctggccagggtggctctgatatagcagccctggtgtattttcgatatttcaggaagactggcagattggaccagaccctgaattcttctagctcctccaatcccattttatcccatggaaccactaaaaacaaggtctgctctgctcctgaagccctatatgctggagatggacaactcaatgaaaatttaaagggaaaaccctcaggcctgaggtgtgtgccactcagagacttcacctaactagagacagtcaaactgcaaaccatggtgagaaattgacgacttcacactatggacagcttttcccaagatgtcaaaacaagactcctcatcatgataaggctcttacccccttttaatttgtccttgcttatgcctgcctctttcgcttggcaggatgatgctgtcattagtatttcacaagaagtagcttcagagggtaacttaacagagtgtcagatctatcttgtcaatcccaacgttttacataaaataagagatcctttagtgcacccagtgactgacattagcagcatctttaacacagccgtgtgttcaaatgtacagtgggtccttttcagaagttgggacttctagactcacctgttcttactncctgttttaattcaacccagccatgcaatggccaaataatagaaatgnttccttaccacttgaacangggaggaagtctggggcagtttttgacccttggtggtggaacatgggttaaanacaatgggtntcc

SEQ ID NO: 77 - DNA, 907 bp, Homo sapiens
  misc_feature 1, 6, 693, 695, 759, 812, 848, 854, 857, 880, 905: n = A,T,C or G
nagctnggtaccgagctcggatccctagtaacggccgccagtgtgctggaattcgcggccgcgtcgaccttgaggatctggcaattggcttacgcaaaaggtcaccatttgaggtcctgccttactaattatgtgctgcccaacaactaaatttgtaatttgtttttctctagtttgagcagggtctgaattttttcatttatttccttttttgccagcagacagacttgagtctgtaaagacaagcaaatacactgacagaagtttaccatagtttctaaaatgtaaaaaagaaaacccccaaaagactcaagaaaattagaccacaaattttgcattgttcattgtagcactattggtaataaaataacaaatgtttgtgcatttttatgtgaagatccttctcgtatttcatttggaaagatgagcaagaggtctgcttccttcattttacttccccttctgtttttgaaaggcagtttcgccaagcttaatgcaagaatatctgactgtttagaagaaagatattgccacaatctctggatggttttccagggttgtgttattactgagcttcatctttccagaatgagcaaaacactgtccagtctttgttacgattttgtaataaatgtgtacattttttttaaatttttggacatcacatgaataaaggtatgtatgtacgaatgngnatatattatatatatgacatctattttggaaaatgtttgccctgctgtacctcatttttaggangtgtgcatggatgcaatatatgaaaatgggacattcttggaactgctggtcanggggactttgtccccctttgcactaaaaagggccanattttnagnagccaggacttccttacccaagngaatgtgatgggacttaaaaaaaanga

SEQ ID NO: 78 - DNA, 721 bp, Homo sapiens
  misc_feature 449, 456, 481, 544, 571, 584, 590, 596, 614, 634, 641, 644,694, 716: n = A,T,C or G
gatccttaactataaattcacggtatgcagagaagaggacagaatctgatttactgattgttcctcatttaaaccatgacttaatctctatcttaggatttaactatctttattttctggttaaaatttttaaaaaaagtggggagagggtgagagtcgtaaggggcaatagcaatagagattacactgtgctgacacagagactaaattctagtcagagtgaagacccatataaaaggccggctgatggtttaaaggaagtaactacatggagtctaatcgagacattcatgagttacatctcattattagccttagtaatgtaagaaaacaattctcaacaaaactggagtccacagttgtcaagtatgctttctcaggcacgggtaggtaaaagtctggagaaatgggttctctccatgcccaatgacaaagcaagacggtctagnttgaggntaagacaggtccattgccgggcggnatccgcagctccagctgagtttacagtggaatcgagtggagatttggagatcagccagcaagntgtccttgctttctcgacctgactgcnatgattgcttccngtttcngctgcntcttttttgttctctganctgctctcactgtggtttgnttctagnttnttcagtctcgtttgtttttatacactgaaagtctactaaacaaagcctcnactattttttttttggacaagntctga

SEQ ID NO: 79 - DNA, 821 bp, Homo sapiens
  misc_feature 595, 698, 717, 751, 754, 784, 821: n = A,T,C or G
gatccactagtaacggccgccagtgtgctggaattcgcggccgcgtcgaccttcccctatcatagaagagcttatcacctttcatgatcacgccctcataatcattttccttatctgcttcctagtcctgtatgcccttttcctaacactcacaacaaaactaactaatactaacatctcagacgctcaggaaatagaaaccgtctgaactatcctgcccgccatcatcctagtcctcatcgccctcccatccctacgcatcctttacataacagacgaggtcaacgatccctcccttaccatcaaatcaattggccaccaatggtactgaacctacgagtacaccgactacggcggactaatcttcaactcctacatacttcccccattattcctagaaccaggcgacctgcgactccttgacgttgacaatcgagtagtactcccgattgaagcccccattcgtataataattacatcacaagacgtcttgcactcatgagctgtccccacattaggcttaaaaacagatgcaattcccggacgtctaaaccaaaccactttcaccgctacacgaccgggggtatactacggncaatgctctgaaatctgtggagcaaaccacagtttcatgcccatcgtcctagaattaattcccctaaaaatctttgaaatagggcccgtatttaccctatagnacccccttttacccccttntagaagcccactggtaaaggctaaacttaagcanttnaaccctttttaaggtttaaaggaatttaangaagaaaccccaacccaaaaaaaaaaaaaaaaaaaan

SEQ ID NO: 80 - DNA, 336 bp, Homo sapiens
  misc_feature 324, 334: n = A,T,C or G
gatccctagtaacggccgccagtgtgctggaattcgcggccgcgtcgacgagacctcacagaggcaaactaaactctcaaggactgagggaattccagtatgcagaactttcaagggggcctcagatacatgagtgtgctggcatgagacatcttagacattctagcccggagagcccccagatgactgcagtcacacctatcatcatgtgaaatagaagaaccaccctgcggagcccagccgacccaccaattgtgatgtcaattattgtgagaaataattaaaaagttgttttgatcactaaaaaaaaaaaaaaaaaaaaangggggggccntt

SEQ ID NO: 81 - DNA, 786 bp, Homo sapiens
  misc_feature 480, 486, 506, 511, 519, 574, 611, 616, 629, 632, 657, 677,682, 703, 715, 716, 731, 764, 784: n = A,T,C or G
gatcctgggacctagtcaaagaggtgcactctgaatcagcattcctagaaaggagtacagtcactcactaggttacgtgctgttccacctgggcagtttctgttcatgtattttctcagtatcactgcacaagccagcaaagggagtctaccacacatcatgcagaagaagtaacactgtcctgggacatggtgtctgtcttctaattcctagcagggcaaacaatgaactgaaaagaaggagaaaccccagcccaattctatttgccatgactgccccactgcagttcacaggtaatgatgggctagagaaagtgaacaggggatgggctgctgctcactcccagctaggcaccagaccatctccacaaagaatgctagaacagagtgatgctgccaccccttggattcataaataagtagattttgatgggtttgaaaaaaaaaaaacaaaactttaaggtaagcggtaagccactanttttgngccaaaaaaaatgctatctnttttntatacctnattcctacctccccatccttgttcctttccgtcccccctcccaaaaaaagaaaangaaaagctaagtttttttttacaagctggcaatcttnttttntccctcctggctnagnaggctccctccttttccaaaactgntgggacgttgaactccgggnctganatttaacctactttctctaantcccaatgaaanncatttcttttttctnccaaatccttttttccactgctttgccctaacngggaaaagcctgataactanat

SEQ ID NO: 82 - DNA, 920 bp, Homo sapiens
  misc_feature 15, 726, 786, 794, 834, 845, 856, 899, 911: n = A,T,C or G
tgatacttcaagctngggaccgagctcggatccctagtaacggccgccagtgtgctggaattcgcggccgcgtcgacgaccgttgactattctctacaaaccacaaagacattggaacactatacctattattcggcgcatgagctggagtcctaggcacagctctaagcctccttattcgagccgagctgggccagccaggcaaccttctaggtaacgaccacatctacaacgttatcgtcacagcccatgcatttgtaataatcttcttcatagtaatacccatcataatcggaggctttggcaactgactagttcccctaataatcggtgcccccgatatggcgtttccccgcataaacaacataagcttctgactcttacctccctctctcctactcctgctcgcatctgctatagtggaggccggagcaggaacaggttgaacagtctaccctcccttagcagggaactactcccaccctggagcctccgtagacctaaccatcttctccttacacctagcaggtgtctcctctatcttaggggccatcaatttcatcacaacaattatcaatataaaaccccctgccataacccaataccaaacacccctcttcgtctgatccgtcctaatcacagcagtcctacttctcctatctctcccagtcctagctgctggcatcactatactactaacagaaccgcaaccttaacaccaccttnttcgaccccgccggaggaggagaccccattctataccaacacctattctgatttttcggncaccctgnagtttatattcttattctaccaggcttccggaataattcntcccatattgnaaacttaactncttcccgggaaaaaaaagaaaccatttgggataacataggggnttggggcttggngcctttgga

SEQ ID NO: 83 - DNA, 771 bp, Homo sapiens
  misc_feature 725, 771: n = A,T,C or G
gatccctagtaacggccgccagtgtgctggaattcgcggccgcgtcgacgtaggtctacaagacgctacttcccctatcatagaagagcttatcacctttcatgatcacgccctcataatcattttccttatctgcttcctagtcctgtatgcccttttcctaacactcacaacaaaactaactaatactaacatctcagacgctcaggaaatagaaaccgtctgaactatcctgcccgccatcatcctagtcctcatcgccctcccatccctacgcatcctttacataacagacgaggtcaacgatccctcccttaccatcaaatcaattggccaccaatggtactgaacctacgagtacaccgactacggcggactaatcttcaactcctacatacttcccccattattcctagaaccaggcgacctgcgactccttgacgttgacaatcgagtagtactcccgattgaagcccccattcgtataataattacatcacaagacgtcttgcactcatgagctgtccccacattaggcttaaaaacagatgcaattcccggacgtctaaaccaaaccactttcaccgctacacgaccgggggtatactacggtcaatgctctgaaatctgtggagcaaaccacagtttcatgcccatcgtcctagaattaattccccttaaaaatctttgaaataggggcccgtatttaccctatagcacccctntaccccctttagagccaaaaaaaaaaaaaaaaaaaggggggggccn

SEQ ID NO: 84 - DNA, 222 bp, Homo sapiens
gatccgtccagtcccaggtccaaggctgtcgcgctggaccagggtttcggtggttcacgggatggtggcagggctcagagcgataagggcacttcttactgcagcccggagtgctgaagccgggagccagtcctctggctagaggcccagaggatgcctggataggtgccccctggaacggcgtcaaagagcctgaaggagacccccgggcagcagcgccgg

SEQ ID NO: 85 - DNA, 741 bp, Homo sapiens
  misc_feature 686, 701, 703: n = A,T,C or G
gatccaaaagatcaactattacttggaccaacatatgctactccaaaagttctagaaaaggcaggattgaccatgaatgatattgatgcttttgaatttcatgaagctttctcgggtcagattttggcaaattttaaagccatggattctgattggtttgcagaaaactacatgggtagaaaaaccaaggttggattgcctcctttggagaagtttaataactggggtggatctctgtccctgggacacccatttggagccactggctgcaggttggtcatggctgctgccaacagattacggaaagaaggaggccagtatggcttagtggctgcgtgtgcagctggagggcagggccatgctatgatagtggaagcttatccaaaataatagatccagaagaagtgacctgaagtttctgtgcaacactcacactaggcaatgccatttcaatgcattactaaatgacatttgtagttcctagctcctcttaggaaaacagttcttgtggccttctattaaatagtttgcacttaagccttgccagtgttctgagcttttcaataatcagtttactgctctttcagggatttctaagccaccagaatctcacatgagatgtgtgggtgggtggttttggtctctgttgtcactaaagactaaatgaagggttgcagttgggaaanaggccactgaaattngnaatattttggaaatttgcaaatatcctgtctttttggg

SEQ ID NO: 86 - DNA, 237 bp, Homo sapiens
gatcctctggagagacagtcaccgtgttcagatagcctgtgtggccaatgtggttggtcttcagcttgcagttagccaggttccataccttgaccagcttgtcccagccacaggagacgatgatagggttgctgctgttgggcgagaagcggacacaagacacccactctgagtggctctcatcctggacagtgtatttgcacacacccagggtattccatagcttgatggttttat

SEQ ID NO: 87 - DNA, 810 bp, Homo sapiens
  misc_feature 627, 663, 669, 696, 714, 733, 735, 757, 759, 768, 802: n = A,T,C or G
gatccgttctctgcgatgacataatatgtgacgatcaagaattagactgccccaacccagaaattccatttggagaatgttgtgcagtttgcccacagcctccaactgctcctactcgccctcctaatggtcaaggacctcaaggccccaagggagatccaggccctcctggtattcctgggagaaatggtgaccctggtattccaggacaaccagggtcccctggttctcctggcccccctggaatctgtgaatcatgccctactggtcctcagaactattctccccagtatgattcatatgatgtcaagtctggagtagcagtaggaggactcgcaggctatcctggaccagctggccccccaggccctcccggtccccctggtacatctggtcatcctggttcccctggatctccaggataccaaggaccccctggtgaacctgggcaagctggtccttcaggccctccaggacctcctggtgctataggtccatctggtcctgctggaaaagatggagaatcaggtagacccggacgacctggagagcgaggattgcctggacctccaggtatcaaaggtccagctgggatacctggattccctggtatgaaaggacacagangcttcgatggacgaaatggagaaaagggtgaaacangtgctnctggattaaagggtgaaaatggtcttncaggcgaaaatggagctnctggacccatgggtccaanangggcttctggtgagcgaagacngncaggacttnctggggcttgcaggtgctcggggtaaatgacggnggcttcga

SEQ ID NO: 88 - DNA, 817 bp, Homo sapiens
  misc_feature 687, 689, 764, 794, 798: n = A,T,C or G
gatccagtgggagcctcctccttccccactcagttctttacatccccgaggcgcagctgggcgaaggaagtggccagctgcagcgcctcctgcaggcagccaacgttcttgcctgtggcctgtgcagacacatccttgccaccacctttaccgtccatcaagcctgacacctgctgcacccactcgctggcttttaagccccgattggctgcattctggggaacttgacacaggcacgtgatcttgccagcctcattgtccaccgtgaagagcatggcagaagtctgaggggagtgcatcttgaagagcttcaaggcttcattcagggccttggctgaggcgccgctctccatctccaggatgacaagaggctggttggggttgctgtcgatgaactgcttcgtcttctctaacactcgtttctggacatcggctttgctggctcggtccaagtcatccatgaccttctttagggatttgagagtctcccgcaattcatccttctgccactgggggatgactgcagtggccagggcctctccaaggtcagcgatctccctctgcacatccttgtttggagcagtctgagccttcactttggcttccatgacagagagacatttcttcaagctctctgctttcctgagggccttctgggcctcggcacctgtgacagccacaatcctncngatacccttggcaatggcttctttccgtcacgatcacaaaagcttcctgcatgacttcgaacattgcattttaanaaggggccccaatttcgccccttattaagnggangtccgtatttaccaaattt

SEQ ID NO: 89 - DNA, 823 bp, Homo sapiens
  misc_feature 797, 820: n = A,T,C or G
gatccactagtaacggccgccagtgtgctggaattcgcggccgcgtcgacgcctatcatatagtaaaacccagcccatgacccctaacaggggccctctcagccctcctaatgacctccggcctagccatgtgatttcacttccactccataacgctcctcatactaggcctactaaccaacacactaaccatataccaatgatggcgcgatgtaacacgagaaagcacataccaaggccaccacacaccacctgtccaaaaaggccttcgatacgggataatcctatttattacctcagaagtttttttcttcgcaggatttttctgagccttttaccactccagcctagcccctaccccccaattaggagggcactggcccccaacaggcatcaccccgctaaatcccctagaagtcccactcctaaacacatccgtattactcgcatcaggagtatcaatcacctgagctcaccatagtctaatagaaaacaaccgaaaccaaataattcaagcactgctcattacaattttactgggtctctattttaccctcctacaagcctcagagtacttcgagtctcccttcaccatttccgacggcatctacggctcaacattttttgtagccacaggcttccacggacttcacgtcattattggctcaactttcctcactatctgcttcatccgccaactaatatttcactttacattccaaacatcactttggcttcgaagccgccgcctgatactggcatttttgtaaatgtggggtggactatttctggatggnctccatctattggaggaaggggnttt

SEQ ID NO: 90 - DNA, 410 bp, Homo sapiens
gatccctagtaacggccgccagtgtgctggaattcgcggccgcgtcgacggcggcaggaggcagtggcgttggtgggaagcgcagctcgaaaagcgatgccgattctggtttcctggggctgcggcccacttcggtggacccagcgctgaggcggcggcggcgaggcccaagaaataagaagcggggctggcggcggcttgctcaggagccgctggggctggaggttgaccagttcctggaagacgtgcggctacaggagcgcacgagcggtggcttgttgtcagaggccccaaatgaaaaactcttcttcgtggacactggctccaaggaaaaagggctgacaaagaagagaaccaaagtccagaagaagtcactgcttctcaagaaaccccttcgggttgacctcatc

SEQ ID NO: 91 - DNA, 240 bp, Homo sapiens
gatccatctggagagacacgtcaccgtgttcacgatagcctgtgtggccaatgtggttggtcttcagcttgcagttagccaggttccataccttgaccagcttgtcccagccacaggagacgatgatagggttgctgctgttgggcgagaagcggacacaagacacccactctgagtggctctcatcctggacagtgtatttgcacacacccagggtattccatagcttgatggttttat

SEQ ID NO: 92 - DNA, 249 bp, Homo sapiens
gatccactagtaacggccgccagtgtgctggaattcgcggccgcgtcgacctgcaaggcggcggcaggagaggttgtggtgctagtttctctaagccatccagtgccatcctcgtcgctgcagcgacacacgctctcgccgccgccatgactgagcagatgacccttcgtggcaccctcaagggccacaacggctgggtaacccagatcgctactaccccgcagttcccggacatgatcctctccgcct

SEQ ID NO: 93 - DNA, 734 bp, Homo sapiens
  misc_feature 678, 703, 733: n = A,T,C or G
gatccccccccgcagtttccaggatttcctccacctgtacctccagggaccccaatgattcctgtaccaatgagcattatggctcctgctccaactgtcttagtacccactgtgtctatggttggaaagcatttgggcgcaagaaaggatcatccaggcttaaaggctaaagaaaatgatgaaaattgtggtcctactaccactgtttttgttggcaacatttccgagaaagcttcagacatgcttataagacaactcttagctaaatgtggtttggttttgagctggaagagagtacaaggtgcttccggaaagcttcaagccttcggattctgtgagtacaaggagccagaatctaccctccgtgcactcagattattacatgacctgcaaattggagagaaaaagctactcgttaaagttgatgcaaagacaaaggcacagctggatgaatggaaagcaaagaagaaagcttctaatgggaatgcaaggccagaaactgtcactaatgacgatgaagaagccttggatgaagaaacaaagaggagagatcagatgattaaaggggctattgaagttttaattcgtgaatactccagtgagctaaatgccccctccaggaatctgattctcacccccggaagaagaagaaggaaaagaaggaggactttttcccanatttccatgggccccctgatccttntccctcttactaaggaggatataaatgctnt

SEQ ID NO: 94 - DNA, 460 bp, Homo sapiens
gatcctgagggtggcctggggcaagtaccggctgagggtccaggtgggctttgtgtacctttgggtcctggggccctggtgacttggactccaggttagagtcaagtgacaggagaaaggctggtggggccctgtgcttccgacttcatttcgagtgatggcagttcccaggaaggaatccacagctgacggtggctgacagatcagagaatggaaggcgaggcaggcgggcgtctgcgtgacctcaggtgcttggggcccagcagacccagagaaccatttccactaggccagggtgccggaagtgtccacaggtcttagattccctgttcagatgaaaagatttgtgcctttaatgataaaagtgatctgcatagagtcaaaaattcaagccatgggtataaaatgcaagtaaaatccctgccctcacctatcccaccctactacacagagatgtcct

SEQ ID NO: 95 - DNA, 710 bp, Homo sapiens
  misc_feature 1, 2, 551, 552, 616, 642, 647, 683, 699: n = A,T,C or G
nnttcatcaccagcaacaactccaaccccgtggaggatgaggatgctgtagccttaacctgtgaacctgagattcagaacacaacctacctgtggtgggtaaataatcagagcctcccggtcagtcccaggctgcagctgtccaatgacaacaggaccctcactctactcagtgtcacaaggaatgatgtaggaccctatgagtgtggaatccagaacgaattaagtgttgaccacagcgacccagtcatcctgaatgtcctctatggcccagacgaccccaccatttccccctcatacacctattaccgtccaggggtgaacctcagcctctcctgccatgcagcctctaacccacctgcacagtattcttggctgattgatgggaacatccagcaacacacacaagagctctttatctccaacatcactgagaagaacagcggactctatacctgccaggccaataactcagccagtggccacagcaggactacagtcaagacaatcacagtctctgcggagctgccaagccctccatctccagcaacnnctccaaacccgtggaggacaaggatgctgtgggccttccctgtgaacctgaggctcagaacacnactacctgtggtgggtaaatggtcanagccncccaatcaggtcccaggctgcagctgcccaatgggnacaggaccctcacttntattcaatgtc

SEQ ID NO: 96 - DNA, 806 bp, Homo sapiens
  misc_feature 1, 60, 732, 737, 738, 804: n = A,T,C or G
ngatcccagccgagaaaagaaacaagcaggatagcaattcttaggggagccccctggganttttaggcagcgtttgcctttccctggttttcttcaccaagccccatcctccccccgcataccacccccagtcaaaagagtgggagaaaatgcacagttcgaagtcggtgagagcaaaaatgggtctagtaaatcaacccgtggtggtagctaaaaggtttggggctgcaaagaaacaaactgtaagttttgagcaacaaactttttcttcaatctgtaatatgtcgaaatgggaagggggtgttgcaaaagccaactaccactgtcaaacttagcccgtttacaacatggggaaaggcgtatttcttactaatatctcaacaacgataacaatgctgtatccttccttaccttgatgttgaactgcgaatcctcctccggatcaatgtccaggaacttagaagaattggtgatattaggagttcagtacttctggaaaaaaatgcaaatggtttagccaggatctttcctgtctgattcgtcactattattatatctgatgatgcgaatggttggagcgattcaatcctaagtcattaatgagctattttataaacaccactgtctgaagatcttcatttacattttgctaaggatcacttcgctaacctcacaggcttgtgtcaacagcatgatttgcaggacttcagttacactcttataaacaacacngctgnnttggtaatcgggtaatattttataaagtgtaaatattttattatgttttgaaggaactattgattnta

SEQ ID NO: 97 - DNA, 770 bp, Homo sapiens
  misc_feature 693, 750, 767: n = A,T,C or G
cgagctctgatccctagtaacggccgccagtgtgctggaattcgcggccgcgtcgaccaaatggcggatgacgccggtgcagcgggggggcccgggggccctggtggccctgggatggggaaccgcggtggcttccgcggaggtttcggcagtggcatccggggccggggtcgcggccgtggacggggccggggccgaggccgcggagctcgcggaggcaaggccgaggataaggagtggatgcccgtcaccaagttgggccgcttggtcaaggacatgaagatcaagtccctggaggagatctatctcttctccctgcccattaaggaatcagagatcattgatttcttcctgggggcctctctcaaggatgaggttttgaagattatgccagtgcagaagcagacccgtgccggccagcgcaccaggttcaaggcatttgttgctatcggggactacaatggccacgtcggtctgggtgttaagtgctccaaggaggtggccaccgccatccgtggggccatcatcctggccaagctctccatcgtccccgtgcgcagaggctactgggggaacaagatcggcaagccccacactgtcccttgcaaggtgacaggccgctgcggctctgtgctggtacgcctcatccctgcacccaggggcactggcatcgtctccgcacctgtgcctaanaacttctcatgatggctggtatcgatgactgttcacctcaccccgggctgcacttgncaccctgggcaacttcncaa

SEQ ID NO: 98 - DNA, 238 bp, Homo sapiens
atccatctggagagacacgtcaccgtgttcagatagcctgtgtggccaatgtggttggtcttcagcttgcagttagccaggttccataccttgaccagcttgtcccagccacaggagacgatgatagggttgctgctgttgggcgagaagcggacacaagacacccactctgagtggctctcatcctggacagtgtatttgcacacacccagggtattccatagcttgatggttttat

SEQ ID NO: 99 - DNA, 305 bp, Homo sapiens
  misc_feature 1: n = A,T,C or G
ngatccagcccacacacgccacaggcagcagctggttgcctggctggacatggatttgctgcactgcagatgttttctgcagacaaggtctggagctggagcaggaaacggcaccctctcaccctccaccatcaccagtcctcttccagtgcttctaggaagtacggcaaaaagaatggtgtttgctgtggtcctttcctttcccaggagcaggactctgtgccaggtagggcccaaacacatctggagcacactcttggttggagctaggcctgaacatctcacacagcctgttcacacagctc

SEQ ID NO: 100 - DNA, 673 bp, Homo sapiens
  misc_feature 12, 13, 669, 672: n = A,T,C or G
tcgccaaagacnnataactcagccactggcctcaataggaccacagtcacgatgatcacagtctctggaagtgctcctgtcctctcagctgtggccaccgtcggcatcacgattggagtgctggccagggtggctctgatatagcagccctggtgtattttcgatatttcaggaagactggcagattggaccagaccctgaattcttctagctcctccaatcccattttatcccatggaaccactaaaaacaaggtctgctctgctcctgaagccctatatgctggagatggacaactcaatgaaaatttaaagggaaaaccctcaggcctgaggtgtgtgccactcagagacttcacctaactagagacaggcaaactgcaaaccatggtgagaaattgacgacttcacactatggacagcttttcccaagatgtcaaaacaagactcctcatcatgataaggctcttacccccttttaatttgtccttgcttatgcctgcctctttcgcttggcaggatgatgctgtcattagtatttcacaagaaggagcttcagagggtaacttaacagagtatcagatctatcttgtcaatcccaacggtttacataaaataagagatcctttagtgccccagtgactgacattagcagcatctttaacacagncgng

SEQ ID NO: 101 - DNA, 614 bp, Homo sapiens
  misc_feature 13, 441, 540, 587, 602: n = A,T,C or G
gcgcaagtaggtntacaagacgctacttcccctatcatagaagagcttatcacctttcatgatcacgccctcataatcattttccttatctgcttcctagtcctgtatgcccttttcctaacactcacaacaaaactaactaatactaacatctcagacgctcaggaaatagaaaccgtctgaactatcctgcccgccatcatcctagtcctcatcgccctcccatccctacgcatcctttacataacagacgaggtcaacgatccctcccttaccatcaaatcaattggccaccaatggtactgaacctacgagtacaccgactacggcggactaatcttcaactcctacatacttcccccattattcctagaaccaggcgacctgcgactccttgacgttgacaatcgagtagtactcccgattgaagcccccattcgnataataattacatcacaagacgtcttgcactcatgagctgtccccacattaggcttaaaaacagatgcaattcccggacgtctaaaccaaaccactttnaccgctacacgaccgggggtatactacggcaatgctctgaaatctgnggagcaaaccacagnttcatgccatcg

SEQ ID NO: 102 - DNA, 532 bp, Homo sapiens
  misc_feature 413, 479, 510, 529: n = A,T,C or G
gtgccactgaagatcctggtgtcgccatgggccgccgccccgcccgttgttaccggtattgtaagaacaagccgtacccaaagtctcgcttctgccgaggtgtccctgatgccaagattcgcatttttgacctggggcggaaaaaggcaaaagtggatgagtttccgctttgtggccacatggtgtcagatgaatatgagcagctgtcctctgaagccctggaggctgcccgaatttgtgccaataagtacatggtaaaaagttgtggcaaagatggcttccatatccgggtgcggctccaccccttccacgtcatccgcatcaacaagatgttgtcctgtgctggggctgacaggctccaaacaggcatgcgaggtgcctttggaaagccccagggcacctgtggccagggntcacattggccaagttatcatgtccattcgcaccaagctgcagaacaaggagcatgtgattgaggncctgcccagggccaagttcaagttttctggncgccagaagatcccatttnaaa

SEQ ID NO: 103 - DNA, 672 bp, Homo sapiens
  misc_feature 89, 157, 167, 177, 179, 199, 208, 277, 301, 361, 382, 397,404, 405, 485, 487, 516, 523, 541, 557, 585, 613, 622, 648,661: n = A,T,C or G
cagacatacacctacaggatcaatgaaaaacaaccaagccattgttaaacatcgcttggtggctttgagtaaaacttccagtgtctgtntaatgtgtcatagaagtatttgaatttaaggagactaccttttaactcaagaaaccttataagaattncatggacagngccctcattngnggagagaattaaccttgtgntaagtagtnatgtgttcattttagctgaagagcgacagagttaggtataggcacatttcagaccttctcgtggtgtgntatttgaattttttggtgccatantggttttctttttaaccaatttaatactggactgcttttttccccagccttgagtttgtnctgcaaaaaaacaatctaagnaataattttaaaacnttggccnnccttttagaaaaagattatctcaatgtaatacactccctaggttaaaagaaatgattgttgggctctttgcactgttatntntaccatcagcttttcctcgatagcatggntacctangagccgagattggatttnttctgggctgctggcnaatgggtatttgagttcataattactgnaggccttcactaattcgctggaagccgnaaacaatangcctttgcactttaactcttagaagnaaactctaagggncctaagagcct

SEQ ID NO: 104 - DNA, 551 bp, Homo sapiens
gatcccattcgcagcctttagcatcatgtagaagcaaactgcacctatggctgagataggtgcaatgacctacaagattttgtgttttctagctgtccaggaaaagccatcttcagtcttgctgacagtcaaagagcaagtgaaaccatttccagcctaaactacataaaagcagccgaaccaatgattaaagacctctaaggctccataatcatcattaaatatgcccaaactcattgtgactttttattttatatacaggattaaaatcaacattaaatcatcttatttacatggccatcggtgctgaaattgagcattttaaatagtacagtaggctggtatacattaggaaatggactgcactggaggcaaatagaaaactaaagaaattagataggctggaaatgcttactttctgctctcattttctttcattttgtctgctgtctttttgaatgccaatactttcatttaaaatgttttgggagcacggcaacccaaaatgactgaacggtggtccaaaaatccaaaccaactgataattactt

SEQ ID NO: 105 - DNA, 288 bp, Homo sapiens
  misc_feature 13, 22, 83, 146, 190, 238, 260, 276: n = A,T,C or G
tcccatggaaccnctaaaaacnagggctgctctgctcctgaagccctatatgctggagatggacaactcaatgaaaatttaangggaaaaccctcaggcctgaggtgtgtgccactcagagacttcacctaactagagacaggcanactgcaaaccatggtgagaaattgaggacttcacactatggacngggttttcccaagatgtcaaaacaagacggcctcatcattgataaggntcttaccccctttttaatttgnccttgcttatgcctgncctcttttcgct

SEQ ID NO: 106 - DNA, 758 bp, Homo sapiens
  misc_feature 4, 12, 563, 682, 727, 731: n = A,T,C or G
gtcnttgggctncttgaatgctatatgggcttcatcaactccttctgagctggaaagagtagcttccctgtattacctcccctactcccttatctgttgtgtattccacttaggaagaaatgcccaaaagaggtcctggccatcaaacataattctctcacaaagtccactttactcaaattggtgaacagtgtataggaagaagccagcaggagctctgactaaggttgacataatagtccacctcccattactttgatatctgatcaaatgtatagacttggctttgttttttgtgctattaggaaattctgatgagcattactattcactgatgcagaaagacgttcttttgcataaaagactttttttaacactttggacttctctgaaatatttagaagtgctaatttctggcccacccccaacaggaattctatagtaaggaggaggagaaggggggctccttccctctcctcgaatgacgttatgggcacatgccttttaaaagttctttaagcaacacagagctgagtcctctttgtcatacctttggatttagnggttcatcagctggttttagttataaacatttggtaaaatagatattggttaaatgatacagtattttagggatgatttaagactatgattacctatacattatatatatttataaganactaaaccaggcatacccttctctgccagaggaggggagctaatnaaanccgttggttctggataaatggactaaa

SEQ ID NO: 107 - DNA, 821 bp, Homo sapiens
  misc_feature 5, 30, 85, 89, 117, 144, 442, 466, 473, 528, 555, 579, 595,599, 604, 605, 606, 614, 645, 651, 669, 695, 725, 728, 731,738, 743, 744, 750, 761, 768, 783, 790: n = A,T,C or G
gtacncttggagggaccgagctcggttccnctaagccttccaggtcctcaactcccgtggacgctgaacaatggcctccatgggntttnaggtaatgggcatcgcgctggccgtccngggctggctggccgtcatgctgtgctnctcgctgcccatgtggcgcgtgacggccttcatcggcagcaacattgtcacctcgcagaccatctgggagggcctatggatgaactgcgtggtgcagagcaccggccagatgcagtgcaaggtgtacgactcgctgctggcactgccgcaggacctgcaggcggcccgcgccctcgtcatcatcagcatcatcgtggctgctctgggcgtgctgctgtcccgtggtggggggcaagtgtaccaactgcctggaggatgaaagcgccaaggccaagaccatgatcgtggcgggcgtggngttcctgttggccggccttatggngaaaagngcccggggtcctggacggcccacaacatcatccaagacttctacaatccgctggnggcctcccggcaagaagccgggagaangggggcctcgctctacgtcgggtngggcccgccttccggnctgngtggnnnctttggcngggggggcttgcttttgcttggcaaacttgntcccancccccggcaacaaaaaanaaagcccctttaactttccggccccnaagggaaatttcttggccttgggcccccgnggnttntttggcntgggnntggggnccccaggggcnaaaaccnttaaaccgggggggnaaaaaangggggggggcccccacccgggggggttttca

SEQ ID NO: 108 - DNA, 565 bp, Homo sapiens
  misc_feature 3, 4, 557, 564: n = A,T,C or G
ggnnccgagctcggatcccaagaacactcacatcgtcatcagctggatgatcgcacagactgtcactgctgttgccgggttgacttcctatccatttgacaccgttcgccgccgcatgatgatgcagtcagggcgcaaaggaactgacatcatgtacacaggcacgcttgactgctggcggaagattgctcgtgatgaaggaggcaaagcttttttcaagggtgcatggtccaatgttctcagaggcatgggtggtgcttttgtgcttgtcttgtatgatgaaatcaagaagtacacataagttatttcctaggatttttccccctgtgaacaggcatgttgtattatataacatatcttgagcattcttgacagactcctggctgtcagtttctcagtggcaactatttactggttgaaaatgggaagcaataatattcatctgaccagttttctcttaaagccatttccatgatgatgatgatgggactcaattgtattttttatttcagtcactcctgataaataacaaatttggagaaataaaaatatctaanctccccna

SEQ ID NO: 109 - DNA, 334 bp, Homo sapiens
  misc_feature 4, 9: n = A,T,C or G
cgcnagctngggccgagctcggatccttacagcatggtatcggggaacactgtcatcgtacctagagcgtttaaagaatccacacttccatagtataaacactaataaagcaagcatcaagatcccagcgagaatagccactaggatgatccaccaaggtactcccgaatactgagctacagtctttgagggaaacacagtcactcgaacctgagtgcctgcatttggcagcctgatattttcggcagcagcagtcacatcaatgaaggctcgcatgagaatgtccaagtagttcagtttggaatattcctctagaaatgtgctgttccataac

SEQ ID NO: 110 - DNA, 749 bp, Homo sapiens
  misc_feature 4, 636, 642, 654, 679, 688, 708, 746: n = A,T,C or G
gtcnacgtcgacgcggccgcgcaagacgctacttcccctatcatagaagagcttatcacctttcatgatcacgccctcataatcattttccttatctgcttcctagtcctgtatgcccttttcctaacactcacaacaaaactaactaatactaacatctcagacgctcaggaaatagaaaccgtctgaactatcctgcccgccatcatcctagtcctcatcgccctcccatccctacgcatcctttacataacagacgaggtcaacgatccctcccttaccatcaaatcaattggccaccaatggtactgaacctacgagtacaccgactacggcggactaatcttcaactcctacatacttcccccattattcctagaaccaggcgacctgcgactccttgacgttgacaatcgagtagtactcccgattgaagcccccattcgtataataattacatcacaagacgtcttgcactcatgagctgtccccacattaggcttaaaaacagatgcaattcccggacgtctaaaccaaaccactttcaccgctacacgaccgggggtatactacggtcaatgctctgaaaatctgtggaggcaaaaccacaggtttcatggcccatcggtccctagnaaattnaatttccccttnaaaaaatcttttggaaaataagggnccccggtanttttaaccccttattaggcnaaccccccctttttaaccccccctttttttaggaaggnccc

SEQ ID NO: 111 - DNA, 500 bp, Homo sapiens
  misc_feature 492, 495: n = A,T,C or G
gcttggaccgagctcggatccccacaagatggagatggtcagcacaaaccgattctgttcctctttaaagtgtatattagccacttagcaatctctatattctttcaagtaaccaagctgttgactttcttactacttgcagtagcctgtccccaacttttccatccagtgcttaacctaaaaaactccttaactctgccttgacctgaggaacaccatgctaactggtgttattttgtatgtaccctgtgcttaattctataacagtaaaccccatacacaggtgggagggaggaacaccggtgcctcggtcactctgggggcagtttagatgctgtgaaattaaacctgttctaagtgtacttgtttgaattaattgtattgtaatattatttgttgaatgtagtaattaggtatttatgaatatattgctgtaatttctgacaacatccaaaaaataaaatcttcctaaattaaaaaaaaaaaaaaaanggnggggg

SEQ ID NO: 112 - DNA, 804 bp, Homo sapiens
  misc_feature 3, 5, 717, 745, 792, 795: n = A,T,C or G
gcngngaccgagctcggatcctatatgtgccaagcccataactcagccactggcctcaataggaccacagtcacgatgatcacagtctctggaagtgctcctgtcctctcagctgtggccaccgtcggcatcacgattggagtgctggccagggtggctctgatatagcagccctggtgtattttcgatatttcaggaagactggcagattggaccagaccctgaattcttctagctcctccaatcccattttatcccatggaaccactaaaaacaaggtctgctctgctcctgaagccctatatgctggagatggacaactcaatgaaaatttaaagggaaaaccctcaggcctgaggtgtgtgccactcagagacttcacctaactagagacaggcaaactgcaaaccatggtgagaaattgacgacttcacactatggacagcttttcccaagatgtcaaaacaagactcctcatcatgataaggctcttacccccttttaatttgtccttgcttatgcctgcctctttcgcttggcaggatgatgctgtcattagtatttcacaagaagtagcttcagagggtaacttaacagagtatcagatctatcttgtcaatcccaacgttttacataaaataagagatcctttagtgcacccagtgactgacattagcagcatctttaacacagccgtgtgttcaaatgtacaggggnccttttcagagttggacttctagactcnccctgtctcactccctgttttaattcaaccccagccatgcaatgccnaanaataaaaat

SEQ ID NO: 113 - DNA, 905 bp, Homo sapiens
  misc_feature 13, 45, 386, 545, 580, 582, 584, 590, 591, 603, 606, 609,610, 616, 621, 623, 624, 625, 629, 630, 646, 652, 670, 672,674, 676, 688, 700, 709, 710, 744, 753, 756, 758, 759, 763,786, 796, 823, 851, 876, 885: n = A,T,C or G
gggcaatcatcancaaactgtgcaccagaatgtaactgccctganagctacccaagtgccatgtactgtgatgagctgaaattgaaaagtgtaccaatggtgcctcctggaatcaagtatctttaccttaggaataaccagattgaccatattgatgaaaaggcctttgagaatgtaactgatctgcagtggctcattctagatcacaaccttctagaaaactccaagataaaagggagagttttctctaaattgaaacaactgaagaagctgcatataaaccacaacaacctgacagagtctgtgggcccacttcccaaatctctggaggatctgcagcttactcataacaagatcacaaagctgggctcttttgaaggattggnaaacctgaccttcatccatctccagcacaatcggctgaaagaggatgctgtttcagctgcttttaaaggtcttaaatcactcgaataccttgacttgagcttcaatcagatagccagactgccttctgggctcctggctctcttctaactctcttcttngggacaccattaagggtccgccaccttcccctgtngngnaatttnnaggggggttttnaanggnnattggnccggnannnttgnnggttttttttttcccnaaaccnaaaatttggggttttatnanangnggggggaaaaanaccccttggggnaaaaatttnnttttcccaaagggggggggccccattcccccccntgggttttnagnanncctngggggaaaaccccgggccccccntttttttaancccaaggggcctttttaaaaaaaaaancctttttcccccccaaacttgtgggggnaaaaatttggggaaaaaaacccccntttttgggnaaaacccttttttttttccc

SEQ ID NO: 114 - DNA, 846 bp, Homo sapiens
  misc_feature 11, 24, 70, 437, 503, 505, 568, 596, 626, 631, 644, 700,713, 715, 720, 727, 742, 753, 762, 763, 770, 771, 774, 781,783, 791, 818, 830: n = A,T,C or G
ccgagctcggntcccaagtccttnctccactgtgccttggtttctcctttatttctaagtggaaaaagtnttagccaccatcttacctcacagtgatgttgggaggacatgtggaagcactttaagttttttcatcataacataaattattttcaagtgtaacttattaacctatttattatttatgtatttatttaagcatcaaatatttgtgcaagaatttggaaaaatagaagatgaatcattgattgaatagttataaagatgttatagtaaatttattttattttagatattaaatgatgttttattagataaatttcaatcagggtttttagattaaacaaacaaacaattgggtacccagttaaattttcatttcagataaacaacaaataattttttagtataagtacattattgtttatctgaaattntaattgactaacaatcctagtttgatactcccagtcttgcattgccagctgtgttggaagtgctgngncgaattacggaataatgagttagaactattaaaacagccaaaactccacaggtcaatattagnaatttcttgctgggtggaaaccttgggntatttatggtcccaaattgggatccctttnttaantgactcaattttnaaaaatgggaccctggccctttttttttaaaaaattaacccaaaaggggccttttnaaaaaaaaatttngnggttnaaacccntttttttaaaagggnaaaaggggccnttttttttnnaaatggnnagngcccctncnttcccccnaaaaaaatttttttttttttttttttnaaacccgggggnttttccccttgggaaa

SEQ ID NO: 115 - DNA, 619 bp, Homo sapiens
  misc_feature 6, 7, 417, 441, 512, 535, 556, 558, 561, 606, 618: n = A,T,C or G
cgaagnncatattatttctattcatgttaaaatttttaacatggtattagcaaaaataaatgaacaatctaaaaatgtataatacattatgaatgtttagattctccaggactgcaaggtaggtttaatattaaaaaaccaattagtataaattaattttattagcatatgattacaaaagaaaaatgcatgaccttctcaacgggtataaaagaagcattcactgacattcaatatccatgcttgataaaatttacggtaaactagaatcagaagtgatatttaataagtacatgttgaaatacatagaagatgccatgtcctgaatgtttgtgtcttcccaaaattctatgttgaaaacatagtcacctgtatgattgtgtaagaaggtgggttcttttgagagggtgattaggncatgagggtagaatcctcatgggnaaagactagtgccattataaaagagggcccaggagacctgcctttccctttcccatctgaagacacagttnggaagggctcttctattgccccngaaaaattggggctttcattngnganaattgactctgcctgggcccctttgatctttgggacttcttccancccttccagaanc

SEQ ID NO: 116 - DNA, 737 bp, Homo sapiens
  misc_feature 370, 411, 413, 419, 486, 489, 571, 576, 583, 596, 606, 631,656, 669, 684, 712, 723: n = A,T,C or G
gcttggaccgagctcggatcccgtgcccattgtggaggcagagaaaagagaaagtgttttatatacggtacttatttaatatccctttttaattagaaattaaaacagttaatttaattaaagagtagggttttttttcagtattcttggttaatatttaatttcaactatttatgagatgtatcttttgctctctcttgctctcttatttgtaccggcttttgtatataaaattcatgtttccaatctctctctccctgatcggtgacagtcactagcttatcttgaacagatatttaattttgctaacactcagctctgccctccccgatcccctggctccccagcacacattcctttgaaataaggnttcaatatacatctacatactatatatatatttggcaactngnatttgngggtatatatatatatatatgtttatgtatatatgtgattctgataaaatagacattgctattctgnggntttatatgtgaaaaacaagaacaagaaaaaatagagaattctacatactaaatctctctcctttttaattttaatatccgcntcatntattatngggcactgttatncgtaataatnggggggaaagatattaacacccggnttggctctagggccgtttcgggatntccgtagacattnatttttaacacgccncccccccgtttttttaaaaaaaaaagcntttggttaaangaatttatttggaa

SEQ ID NO: 117 - DNA, 781 bp, Homo sapiens
  misc_feature 6, 79, 104, 189, 410, 419, 527, 588, 602, 607, 608, 628,629, 662, 669, 699, 701, 703, 755, 765: n = A,T,C or G
cttggnaccgagctcggatccgttctctgcgatgacataatatgtgacgatcaagaattagactgccccaacccagaanttccatttggagaatgttgtgcagnttgcccacagcctccaactgctcctactcgccctcctaatggtcaaggacctcaaggccccaagggagatccaggccctcctggnattcctgggagaaatggtgaccctggtattccaggacaaccagggtcccctggttctcctggcccccctggaatctgtgaatcatgccctactggtcctcagaactattctccccagtatgattcatatgatgtcaagtctggagtagcagtaggaggactcgcaggctattctggaccagctggccccccaggccctcccggccccctggtacatctggncatcctggntcccctggatctccaggataccaaggaccccctggtgaacctgggcaagctggaccttcaggccctccaggacctcctggtgctataggccatctggtcctgctgganaagatggagaatcaggtagacccggacgacctggagagagaggattgctggacctccaggnatcaaaggccactnggatnnctggattccctggtatgaanngacacagaggcttagatggacgaaatggataanagggggnaacacgggctcctggattaaaaagggtgananangtctttcaggccaaaaatgaagctcctggaacccatgggtccaagaaggggntcttggtaanccaagacattcttgaa

SEQ ID NO: 118 - DNA, 654 bp, Homo sapiens
  misc_feature 578, 644, 646: n = A,T,C or G
gcttggaccgagctcggatccttcttgggtactcctgaaatcagacatgttcctgtagaaagaattttaagttaggctttctatgcacctatcaagaatcaagagaatagattgtatcaaacaacggcagggaaatccttcagcaattctaatccactttgggttttcagctgtttttacatctaaagcaatagactagaactgaattatcttctacatagtaaaatcacaattgtggaattacaggaattctggtgatattaaggtgaaataacaaaacacaaaaggccctattttaacagttgatgtgacagtaagttttaatagaacctgtaacttcattttggaaatgcttctccaccaaataagggctttttcccctatttaaggagccagatggattgaaagatgtggaaataggcagctgtagatcttgatcttccaggtaccccatgtacctttattgagcttaattataatactgtcaaattgccacgatctcactaaaggatttctatttgctgcagttaaaaataaagccctaaatacatttttattctttctactgagggcattgnctgttttctttgtaaatgccgtacaataaacaaattatttaataacctaaaaaaaaaaaaaaaaananggggggcc

SEQ ID NO: 119 - DNA, 765 bp, Homo sapiens
  misc_feature 3, 38, 70, 436, 541, 575, 592, 636, 638, 658, 661, 662, 670,675, 676, 683, 694, 715, 731, 758: n = A,T,C or G
ggnccgagctcggatccaagggatgctgatgatgctgngtatgacgcttgatggaaaagaactctgtagngaaagggttactattgaacatgctagggctcggtcacgaggtggaagaggtagaggacgatactctgaccgttttagtagtcgcagacctcgaaatgatagacgaaatgctccacctgtaagaacagaaaatcgtcttatagttgagaatttatcctcaagagtcagctggcaggtttgttgaaatacagttttgagttattttgatgtggctttttaaaaaagttaatgggtagctaatgttgtattgttttattaaaagtagttttaaattaatggatttaatggaattgtaattttaaacatttaattaaatgtaatttgggggatattttgaactttaatattagtgatcaaatgtaaatgntttgaggatatttttcttgttttttaaaatcaatttttaaccaaatattaaaccctttatttgccagcctgtctgtgcggtggccttatgacgaggagtgcctgngggttatcctaatcgctgtcttggcactcttggntgggctggctgctttgncagtcaagctcctacagtgatcaggtggccacctttagatctgngnttgccggcctagacgttatnggnngcactttnccttnnaagtggnccaggtttgcntgcggattcccccaggaaggngggggggattaaccgnggaatctttggattcccccttaaaggnttgggga

SEQ ID NO: 120 - DNA, 476 bp, Homo sapiens
  misc_feature 474, 476: n = A,T,C or G
gatccatattccattatttttgaatgtcttgcacatagtagctgtggagcgcaccacgcacaccctcattctttccagattaggattctggtcagggttgacacttgctgtttttaattttcattttatcataagcagtttaagactgttgccagtggtaatttgcaatttttatcaagacctcttcattatagcttctgacaggacagatgctgtaattaatcatgcaagacaactggggatagtggtcacactgctctcaaagaggaaccgctacagagcaagaaaaggggggaataaatgggcaccgaaataattattttggcttaagaattagcattcaccatctattttaatcgcaataacattacaatacccagctagttctagccccctcaaaaaagcgattaattttttctctatacttaccttgtacttgcatcttaaaaaaaaaaaaaaaaaaaaaaggggggncn

SEQ ID NO: 121 - DNA, 616 bp, Homo sapiens
  misc_feature 1, 30, 98, 99, 284, 394, 443, 450, 466, 490, 565, 610, 614: n = A,T,C or G
natgtatctacctttgaactgtttcatgcngctgtgttttcaaaagctgtggccatgttcctaaattagtaagatatatccagcttctcaaaaaatgnntatgattgctgttagccatgtctattgtttttcctctggattcttttcttataacttggaatacacaaaagtataaaacaagagatgtgcaccaatgaaaactatgctgggtcgaattaccttcagcacaatgttaatgttttcgttctcatttatgcctttgtccatttgcacacaacagaaantgtaatgagcttcactatttttgtttctttccttcctttttttcttttttccttctttccttttcttggcttgttcttgctttttctcttggaagttctttcttaattgncatttttgcacaaaaagccaagaagagctttagtttcttggcaagaatnatggganattaggaagtaaaggncttaaagctgatgactggataganataagcctgttaactccttaaccttggctggggccgatatgctatgccagtctccttaatatgcaagattttctntctgaggaaatatcggatgactataaagcctctgattaagtatanattntc

SEQ ID NO: 122 - DNA, 663 bp, Homo sapiens
  misc_feature 1, 32, 227, 413, 463, 496, 550, 555, 572, 588, 620, 631: n = A,T,C or G
ncaccctttgcccagaaaaaagccaggaatgnatcgagggaatggccatcagaatcactatcctcctcctgttccatttggttatccaaatcagggaagaaaaaataaaccatatcgcccaattccagtgacatgggtacctcctcctggaatgcattgtgaccggaatcactggattaatcctcacatgttagcacctcactaacttcgtttttgattgtgttggngtcatgttgagaaaaaggtagaataaaccttactacacattaaaagttaaaagttcttactaatagtagtgaagttagatgggccaaaccatcaaacttatttttatagaagttattgagaataatctttcttaaaaaatatatgcactttagatattgatatagtttgagaaattttattaaagntagtcaagtgcctaagtttttaatattggacttgagtatttatatattgngcatcaactctgttggatacgagaacactgtanaagtggacgatttgttctagcaccttttgagaatttactttatgggagcggtgnaagcnatttatatacaaggaanctattttatgcggtgnttaagagaatgggtgaaatcatgttttttccnataaaaaatancttggggcaaaaaaaaaaaaaagggggggccc

SEQ ID NO: 123 - DNA, 121 bp, Homo sapiens
  misc_feature 3, 30: n = A,T,C or G
acnatgatagggttgctgctgttgggcganaagcggacacaagacacccactctgagtggctctcatcctggacagtgtatttgcacacacccagggtattccatagcttgatggttttat

SEQ ID NO: 124 - DNA, 671 bp, Homo sapiens
  misc_feature 33, 253, 315, 455, 560, 596, 664: n = A,T,C or G
gatccttgccttcaaaagacacaaatgcagtangttttcatttcttacattcacttaaaaatggattatgattccagcaggcaaatctgcatattaaatatagacaacccaaccacagtatctgaacgttaaaagaaatctatcacgacagacattttacctagttataaataacgtaacaatagatcacactcagatttcttaaacagctcactcaggagtttcctcttttaaaaattaaataacttatggnacctcacacttatagcacatacacagttcatagctgaaacagcttcttaaaagcagaatgcncaatcacattgactttttcagcttctaaaagcttctttgtagatattaaactgccctcactacaaggcagtatgaacaagaactggattctgattctggtggcaacacaataactataaggcagtaagaacaagaactgnattctgattctggcagcaacacaataactaaaacaccattcaccacatgacaaaacaaacaaatccaatgacaaaaaggaatcggaaaaaaagcagcaacagaancagtgtgtggcaatcattcacataaggcccctcttncaccataccttatgatatacatcccttatagcatgacaatgtaccccaaggcaccttgaggcctcatnataccac

SEQ ID NO: 125 - DNA, 579 bp, Homo sapiens
  misc_feature 7, 403, 419, 565: n = A,T,C or G
gcttggnccgagctcggatcccaaactgtaaaagattgaaataatctttctcaggattttttaaatgtctaagattatgatgtcatatctcccacttaccttataagtaaaaaggttaatatcaagtaacttattagctcttaaagtaaaattgaacttattaaaagctatctatgatttaatagatttaataaaattccttcacgacctggtacccttgtgaaactgtaaaatatatcatatggggggagttttttaactcttattttttgaaaatttactgtagcttctatttcgtgaataagaatgttttgattttgatcatacaaataacttttgtagatttttgtttacttttgggggggttcccttagaagacattaaaaaaaaatactgccttggnctgtgcaggctgctgnaatgaaatactatgaacttggcagcttataaacaacagaaatttatttctcgctgcctcaatggtgggaagccaagattaagggatcaacaaattaggcctctggatcatacatggcattttctagctgtgccttatacataaaangaaaaaggggctct

SEQ ID NO: 126 - DNA, 855 bp, Homo sapiens
  misc_feature 44, 70, 95, 96, 118, 138, 196, 284, 346, 450, 451, 479, 521,526, 530, 552, 567, 595, 600, 604, 607, 639, 650, 659, 681,683, 684, 694, 695, 696, 699, 701, 702, 705, 724, 742, 755,756, 759, 760, 767, 779, 780, 782, 795, 797, 805: n = A,T,C or G
  misc_feature 826, 854: n = A,T,C or G
atccattcatggacaagtgtatttgtcttctgttttctcaatgncaatagtctgtgtttcactacctggngggatatattcgtagtcatcatatnngaggcctaggattggatattgngtcctgtactttttagtggnaatagtagtccttccaccagtggagggttggttatgagaggaatatatttcttgccgnaacttggagagttcctctgactgacgctttatgagggaatccttctcttccagcaagcttgtcagttcatgaagcttaaattggaagncactacaacttccttctctctttgaaacatctttatggtactggtttaattgggacctcagnctgcagatctctctatctttctccattctcaagttttttaccatctccgtgtagtggttgccaatctcatccattttagcctgcaacattgggcctgtgcaagnntcagaaacctgcattctaaggctttgangctcttgctctaaatacgtttacaatattccagttcttttangctgnattncatgcttgataagagtatgtcngaagagagagaatgntttctttcaatgccctggcattttgaancttgnaggnctnggaaggccctttgcctgcttgcctgggggggnattaattaagncctcctccnccttggaaagggcccccaaagnanngttccctttnnnggngnnccncccttttttttaaaaattntggggaggggggggggcnttttttttttggnnaannggggaanaaaaaaaaaagnncntttttttcttttnanaaaggggngcccccccaaattcctttttnggggcccaatttttttttccccccaagng

SEQ ID NO: 127 - DNA, 240 bp, Homo sapiens
gatccatctggagagacagtcaccgtgttcaagatagcctgtgtggccaatgtggttggtcttcagcttgcagttagccaggttccataccttgaccagcttgtcccagccacaggagacgatgatagggttgctgctgttgggcgagaagcggacacaagacacccactctgagtggctctcatcctggacagtgtatttgcacacacccagggtattccatagcttgatggttttatc

SEQ ID NO: 128 - DNA, 622 bp, Homo sapiens
  misc_feature 4, 209, 530, 542: n = A,T,C or G
gctnggaccgagctcggatccgatgaatggctggccagttactcagagtaatatgtttatgagttaaatggattgcataacggcaccacttttcctttgtcactgtggtggataaatgacaaagtagattccaatctcctgtatagaaaggtggttacccaatagcctcactggtggcttgctagcagagcctcaagttgcacctctgnggctttctgtaaattcgagtcctacagccacttcgagaacgctgcaatccccaaggcccacttggtccatgctgaagaagcggctgtgaccccaatcctgcctctcttttgctcttcagtattacttactggaggaatatgtaatattctaggtcaagtctaggagaggctcatcctaaaaaaaaaattgcaaagtcttttctcaattaaaacaaaaaagcctcaagtacatctcaatcatgtcaaaattatggttaaaaattgacattatgtagggaaatagcagcagagaatggctaatcttaaaaaataacgaaccanccaaccaaaaancaaaacaaaacaagaccaacaaaaaaaagtgccatcccacccctccccttgggtctttcatttggggggtatattaaaga

SEQ ID NO: 129 - DNA, 600 bp, Homo sapiens
  misc_feature 4, 580, 589: n = A,T,C or G
gctnggaccgagctcggatccaacttaaagtaaaagttggaaagggcaacgagtcttttaagcggaacttcaattctgttgtcatggttacttatatataatgaatataaatagacaaataggacttggaaaatgtggtatattctaagtcaagatgctatgaagttgttatagtttaagggacattcttaagaaggaattacttaagtacattactcttctcattttcaaggacatgaaaaagtaaaggatggtctggcactattttattttatttttttttgacttgtactgaatatatgtactttgaagatttacatctataactagaaagtatgctaatccgaggtctggttattaggccagattcttgttcagttattttttaaactaatgttgcctcctttttagtaagattctacgaaagttttttaactattaaagttatttcttaaggggtagctcttatacttcctctgctctctttttcagtttccataaaaagctgttttcttagctattactccaaataaagtctttggttgcttaaaaaaaaaaaaaaaagggggcccgcgccccncctttaagnggccccaatgg

SEQ ID NO: 130 - DNA, 698 bp, Homo sapiens
  misc_feature 4, 16, 66, 152, 154, 156, 244, 263, 316, 401, 404, 414, 441,446, 449, 464, 496, 524, 525, 528, 585, 589, 625, 630, 670,683: n = A,T,C or G
tagnaaaacccagccnatgacccctaacaggggtcctctcagccctcctaatgacctccggcctanccatgtgatttcacttccactccataacgctcctcatactaggcctactaaccaacacactaaccatataccaatgatggcgcgangnancacgagaaagcacataccaaggccaccacacaccacctgtccaaaaaggccttcgatacgggataatcctatttattacctcagaagnttttttcttcgcaggattnttctgagccttttaccactccagcctagcccctaccccccaattaggagggcnctggcccccaacaggcatcaccccgctaaatcccctagaagtcccactcctaaacacatccgtattactcgcatcaggagtatcnatnacctgagctnaccatagtctaatagaaaacaaccganaccanatnattcaagcactgctnattacaattttactgggctctattttaccctnctacaagcctcagagtacttcgagtctnnctncaccatttgcgacggcatctacggctcaacattttttgtaggccacaggcttccacngganttcacggcattttttggctcaactttcctcactatnttgcntcattccgccaactaatatttcactttacatgcaaacatncttttggctttanaaggcgccgcctgga

SEQ ID NO: 131 - DNA, 62 bp, Homo sapiens
  misc_feature 3, 30, 59: n = A,T,C or G
ggngggacctggccctcctggagaagtacngtgcttcccccccaagccaagaaggaagngtc

SEQ ID NO: 132 - DNA, 418 bp, Homo sapiens
gcttggaccgagctcggatccgagggattgaaggtctgttctaggtcggcctgttcagccaccaactctacaagttgctgtcttccactcactgtctgtaagctttttaacccagacagtatcttcataaatagaacaaattcttcaccagtcacatcttctaggacctttttggattcagttagtataagctcttccacttcctttgttaagacttcatctggtaaagtcttaagttttgtagaaaggaatttaattgctcgttctctaacaatgtcctctccttgaagtatttggctgaacaacccacctaaaggcccttttgcatccattttaaatatacttaatagggcattgttcactaggttaaattctgcagagtcatctgtctgcaaaagttgcgttagtatatctgcca

SEQ ID NO: 133 - DNA, 348 bp, Homo sapiens
gatccttagggctcttcaccacctcctggagattgtattttctaaacaacatgtaatctttcacaacactcaggcaacagacagctttgatgatttctactaccactgtgtactgtggattggtgagatccactttattttctgaattgagggtgcacactattcctgccaattctctgataacttcttctctattcacatgactgttatttcgagatttgtacacaatctgaaatgtccctttgtttggagctttaaaccagggttccaaaaatgtttctgcatattttttcatatcttctaaaaaagccttgcatgtgcctgagatgggtaacattcgcaaaataa

SEQ ID NO: 134 - DNA, 761 bp, Homo sapiens
  misc_feature 3, 6, 515, 588, 721, 733: n = A,T,C or G
ctnggnccgagctcggatcctcttaccccatcaacagtggggcactcccttccttctagccccttccttcacgtctatgtggtttagcctggttagtaacttggacgaacagaagcttttctctggaacttgacacagcaatagatttcctgtatgaagccctgaagcaaagacggaggaagcagattgattgaattatctctcagctcattggttctcctctcacttctgctgtacacagacaaactttacagtaaggcattgaacgtgtccaagataaacagatttgtctaaacttgcaccaaaaagtaaaacagaatattgatctactttggcccatccttgtaaatttcccaattatgatgacttttagaggctttctccaggttgaagagctttacggccttagtatttgagtctggaatacaatatgttttcttgaaaattattgtgtgaaattcctgtctataatgggagtcaacacacaaccctgtaaacatcatatgtgtattagnttcctattgctactgtaagaaattaccacaaactcagtggcttaacacaacacaacatttattatcttacagntctggtgatcagagtctgaaatggacttaggggactaaaatcaaggtgttggaagggctgactccatctggaggctcgggcagaatttgctccctgccttttccagcgatttgagaatgcctgctttcttggntgcagctacatnattcggacctctggccactgcacatctt

SEQ ID NO: 135 - DNA, 787 bp, Homo sapiens
  misc_feature 637, 642, 702: n = A,T,C or G
gatcctttattctgcccagtggctaactttaacaacatccctaatacaactgtttattcaaatgcacggtggtccctgttagagttagacctctagactcacctgttctcacgccctgttttaatttaacccagctatgggatgccagataacagaattgctgcctactagctgaacagggaggagtttgtgcagttgctgacacttcttgttgcacataaataaatacagtgggtactatagagactcagttgcaaaaattaacaaatatgctgcttgattaaaatgggtaggcttctcatgtggctcattctttaatctattctcttttatttggtttggttcatggggtctctgcctatggatcatacttcaaactcttggtgtgatcctcctgattgtcacaatattagttaccctggtgtgctgtattctctaaaacctttaaatgtttgcatgcagccattcgtcaaatgtcaaatattctctctttggctggaatgacaaaaactcaaataaatgtatgattaaggaggacatcataacctatgaatgatggaagtccaaaatgatggtaactgacagtagtgttaatgccttatgtttagtcaaactctcatttaggggacagcctggngactncagaatggagccagtcatgctaaagccatatactcacactggaaacatgaggaagcaggnagatcccagaacagacaaaattttctaaaaacatgagaagtccaggctggctgagtcagcccagtaagaaagtcctttctgcttt

SEQ ID NO: 136 - DNA, 362 bp, Homo sapiens
  misc_feature 345, 360: n = A,T,C or G
atttgagaagacttgagaaatgtcttaatactcacactgctgcatgtagctcttgcttatttactggtctgggaaacaggatgtgtttcctttttttaaaagccaattgacagattacacctaaatactcctccttttgtatcattcagccttttgttttagtttggtaagttttaagaaatttcagcagcaaagttgttattcagtgggcacgatggactccaaatgcctcaagttatgtatacctgtcccagatgtaaacttcattgtcctttgttggatgatattttaaatggatataaaataaattggtctaaagggcaaaaaaaaaaaaaaaaaaaaaanggggggccccccccncc

SEQ ID NO: 137 - DNA, 240 bp, Homo sapiens
gatccatctggagagacagtcaccgtgttcagatagcctgtgtggccaatgtggttggtcttcagcttgcagttacgccaggttccataccttgaccagcttgtcccagccacaggagacgatgatagggttgctgctgttgggcgagaagcggacacaagacacccactctgagtggctctcatcctggacagtgtatttgcacacacccagggtattccatagcttgatggttttatc

SEQ ID NO: 138 - DNA, 598 bp, Homo sapiens
  misc_feature 268, 393, 463, 506, 595, 596: n = A,T,C or G
gctgggaccgagctcggatcctttggtcgggttctcccaaattcttttgaggtgtccatggtcaactgcttcagctttgttttggcaaccccctgcccgaagtcgcatataggctgttcttcaccttgtttccaaggctgaggaacagaaagtagcctctgttttgaggaggtggaagttaagtatacatttattttttactgtgacttgttcaggaccacattttacaaaatgccttgtttccttcattgtttctggaaaggaaagntctattaatattgttttactttgaatatagaatagtttttttaattagggcttattttgaaaaattctgagtttaattcaaatgtatgccaataccttccaaagtaaggtaatattcagagacanttgttgtgatcagatggcttagagaaatttctggaatattcacattcgaagattccttattaatgaatgnctttgacttaaatctaaccaaaaactgcaacattattctttgnacattttcattatataggggtaacaagcttaggtgctaacaaataaaatacttaagctatttgtttaaaaaaaaaaaaaaagggcggcnntt

SEQ ID NO: 139 - DNA, 632 bp, Homo sapiens
  misc_feature 4, 157, 175, 243, 246, 281, 283, 385, 395, 401, 405, 430,460, 478, 492, 495, 513, 514, 524, 538, 563, 620, 632: n = A,T,C or G
gttnacatttggaagggcgttcaaatataacccatgttccactcaaggcacacttgatgatctttgaaagggcgttcaaaaggcgggatggtctgcaggagggtataattctttgctacagcatggagcaagttttcctcccatttaacattccagnctctgccactgtatttgngagtaatccaggcgcgtactatcactgcagatacagagatggaatgctgatgaaataatcatctctgnganccataatgcttgggaatttcacatgtactatttgngnctgctggtgtgaagatgcttctcattcttccacctttttttgtcacgggaatgctacttctgaactcagatgaaacaactgcttccaaattgacaacacaangctgagagcntaaatnctcnaccgagacttcagaaacgttgcgancgttttcttcaaagacaggaaaataaatangctttgtaagccacgctntgtcagctttgggnatnactgatgcgtcagggaanntgcctacccnaagatgggacacantcaggtagcagacaggagcagcgcnagcagagcggcgtcgacatcatcttgagggccaatcgcctataggagcgatacatcntggcgcgttcan

SEQ ID NO: 140 - DNA, 553 bp, Homo sapiens
  misc_feature 36, 39, 51, 54, 56, 71, 72, 75, 78, 82, 86, 90, 100, 102,107, 115, 116, 124, 130, 140, 148, 151, 154, 159, 161, 179,183, 185, 186, 191, 202, 211, 217, 232, 245, 256, 272, 274,276, 279, 280, 281, 282, 283, 301, 315, 316, 334, 346: n = A,T,C or G
  misc_feature 355, 370, 391, 403, 408, 410, 445, 452, 467, 468, 485, 527,537: n = A,T,C or G
cgttgatattgatgagtgccgggagatcccaggggnctncgggaattcatnatnanaaccgggtaaacccnnatnaantttnatanaacncctggttttncncgttncccaaaanntttcaaangttaanatttgtcttngggatttngcnccnctttntntttcccggggccttttgntacncnnacgcncccccgggggngggaatggnctttgntccgtgggaaaaccntggcccacccccnaccgaattccnttcccctttttggggncncnggnnnnnggaaccaaaccgggggcncctggttttttttnnaaaaacccaattcccccngttcccttaaanaaaaggggnggccccccaaaattntcccggcccccccttaattanaatttggaaggncccgngngaatttaacccaaaaatttccaccttgggggcccntccccangttttttttaccaannccttggggggggggggncccaaaattttcggcccccttaattaagttgggagggcccgnaaatttaccnaaatttcaaccttggg

SEQ ID NO: 141 - DNA, 527 bp, Homo sapiens
  misc_feature 13, 520, 527: n = A,T,C or G
cgaaagcgaaganggaagctcctgcccctcctaaagctgaagccaaagcgaaggctttaaaggccaagaaggcagtgttgaaaggtgtccacagccacaaaaagaagaagatccgcacgtcacccaccttccggcggccgaagacactgcgactccggagacagcccaaatatcctcggaagagcgctcccaggagaaacaagcttgaccactatgctatcatcaagtttccgctgaccactgagtctgccatgaagaagatagaagacaacaacacacttgtgttcattgtggatgttaaagccaacaagcaccagattaaacaggctgtgaagaagctgtatgacattgatgtggccaaggtcaacaccctgattcggcctgatggagagaagaaggcatatgttcgactggctcctgattacgatgctttggatgttgccaacaaaattgggatcatctaaactgagtccagctgcctaattctgaatatatatatatatatatcttttcaccatanaaaaaan

SEQ ID NO: 142 - DNA, 831 bp, Homo sapiens
  misc_feature 43, 91, 93, 95, 181, 197, 503, 506, 527, 564, 571, 578, 579,595, 614, 636, 660, 676, 686, 712, 716, 726, 747, 748, 768,777, 778, 800, 820: n = A,T,C or G
gtccagtggcctaaaatgtacaaatgcacttaatgtaaatgcnggagtttgaggtgtctgcttggccactgtacaaaagtgatgaagtggnangnttaaataataagcctacaacatagaatacattaaaacttgcacatatacatgttcacagcatgtatacaatgataatccctacggnttaaccaagttatggntcccttctacagcagacacaaaaccaaggtgaactaggttggcagatgtagagtgaataccaaaaaaagggtaatcggttcactgattctgaaagatatgactgaacatactgagcatctagactttgggaatgcatacaggtaacaatatcttggttcggctgattaaaagtcctcattcttaacatcttaagtaaatgctgatcctgtttgtttcagcactgtttaataaacaaaaaaaattgtttgccagcagctctgttggaaagctataagcctgttacatgattgataaaaaaggcaatntanaggtttctcctaataaatatngaacatttataaaataagacatcaattcattctgttnttttaanaaaaaannaagccccccgagttgnataccaaactgccccgggntttggatattacagcaaagggncttttttttttaaaaaaaagaacnaattgccttttttccnaaccagaaancataacttttgggggggaacccggtnaatnggggcaattncccaaggcccccttttttttnnttttttttttttaaaaaccnaattagggnntaagggggggattttaaaaccntttttcccttttccccaccntttaaaagggg

SEQ ID NO: 143 - DNA, 1081 bp, Homo sapiens
  misc_feature 6, 66, 439, 447, 467, 491, 499, 506, 546, 609, 615, 639,649, 653, 674, 677, 703, 704, 719, 721, 731, 739, 754, 772,795, 838, 863, 870, 882, 883, 884, 885, 886, 887, 888, 889,890, 891, 892, 893, 894, 895, 896, 903, 905, 906, 921: n = A,T,C or G
  misc_feature 927, 933, 938, 947, 971, 989, 1008, 1025, 1028, 1053, 1061: n = A,T,C or G
gatccnaaggtaatccaatgtcttttaaattaagcttgtgacaattaaaccaatacactgtagcantgagaaaactattgacaaagtataaccagggaatattcatctcaatatatgctggaatctgaactttaagtaaaacaatgattacctgaagtagtacaaatggtaaccaggtactgagaaaacagacaatgagcttggataagaatatttttttagatctcacagtataactggagtgggatgaaaaaggaaaatataagatagtttcattcatataggaagttatcctgatagcctgtaccaaagtagtaacttcttcccaacaggttatgaaagctacaaataaaatcatcaccatgaaaaatgacagccagtaactctgaatgctgacatagaaaggacagtgacgagaataagcattctgtgccttcangctttggnagatggctgggtctcccaanacataagcaaggactgaaatccanattaaaantactgtnaagaaataaaataattttgacacttaaatgaaagcttggntgtttagagaaatcaggcaatatctatacaagctgcaggaaacttggataatgcaaaaggccntaagtnaaggaaataatttggagtaaaaanggcggatgtnggantttaggggaaccctaaaggcnttnaaaaggtcccaaaaatccccttgganntttccaattttttantnggggaaaaanggtttttncccccaaaaaagggnaaaaaaaggaaaccccancccgaaaattggccttaaggggngggaaaaaaagggccccaaaaaaaaaattttttttttcccccntttaaaaaaaaaaattttttttggnaaacccngggggggggggnnnnnnnnnnnnnnnttttttncnnaaaaaatttcccccnctaaangggggnaaaangggggtttnttttttttaaaaaaaaaaaaaaantttttttcccccccccgntttttgggttcccaaaggnaaattggcccaaaaaanggntttaaacctttttttggggggcctnggtttttnttttggccggaaaacctggg

SEQ ID NO: 144 - DNA, 590 bp, Homo sapiens
  misc_feature 444, 480, 486, 507, 511, 528, 543, 575: n = A,T,C or G
gtccgtgaatggctggccagttctcagagtaatatgtttatgagttaaatggattgcataacggcaccacttttcctttgtcactgtggtggataaatgacaaagtagattccaatctcctgtatagaaaggtggttacccaatagcctcactggtggcttgctagcagagcctcaagttgcacctctgtggctttctgtaaattcgagtcctacagccacttcgagaacgctgcaatccccaaggcccacttggtccatgctgaagaagcggctgtgaccccaatcctgcctctcttttgctcttcagtattacttactggaggaatatgtaatattctaggtcaagtctaggagaggctcatcctaaaaaaaaaattgcaaagtcttttctcaattaaaacaaaaaagcctcaagccatctcaatcatgtcaaaattatggntaaaaattgacattatgtagggaaatagcagcaganaaccanccaaccaaaaaacaaaacatntcangaccatcaaaaaaaagngccatcccacccctncccttgggtctttcattttggggggtatattnaaaaaactcgagcct

SEQ ID NO: 145 - DNA, 799 bp, Homo sapiens
  misc_feature 88, 173, 394, 463, 550, 552, 566, 571, 606, 622, 645, 682,688, 710, 714, 748, 762, 790: n = A,T,C or G
gatccgttctctgcgatgacataatatgtgacgatcaagaattagactgccccaacccagaaattccatttggagaatgttgtgcagnttgcccacagcctccaactgctcctactcgccctcctaatggtcaaggacctcaaggccccaagggagatccaggccctcctggnattcctgggagaaatggtgaccctggtattccaggacaaccagggtcccctggttctcctggcccccctggaatctgtgaatcatgccctactggtcctcagaactattctccccagtatgattcatatgatgtcaagtctggagtagcagtaggaggactcgcaggctatcctggaccagctggccccccaggccctcccggccccctggtacatctggncatcctggttcccctggatctccaggataccaaggaccccctggtgaacctgggcaagctggaccttangccctccaggacctcctggtgctataggccatctggtcctgctggaaaagatggagaatcaggtagacccggacgacctggagagcnangattgctggacctncaggnatcaaaggccacttgggatacctggattccctggnatgaaaggacacagangcttcgatggacgaaatgataanaggggaaacagggcttctggataaaggtgaaaaggtnttcagnaaaatgagttctggaccatggnccanaggggtctggaagcaagacgcagaatctggctgngggccggtatatgnctaaatcttaggcaatgctagggcatcntatgcggtt

SEQ ID NO: 146 - DNA, 789 bp, Homo sapiens
  misc_feature 669, 675, 687, 721, 789: n = A,T,C or G
gatccctagtaacggccgccagtgtgctggaattcgcgkccgcgtcgacgtaggtctacaagacgctacttcccctatcatagaagagcttatcacctttcatgatcacgccctcataatcattttccttatctgcttcctagtcctgtatgcccttttcctaacactcacaacaaaactaactaatactaacatctcagacgctcaggaaatagaaaccgtctgaactatcctgcccgccatcatcctagtcctcatcgccctcccatccctacgcatcctttacataacagacgaggtcaacgatccctcccttaccatcaaatcaattggccaccaatggtactgaacctacgagtacaccgactacggcggactaatcttcaactcctacatacttcccccattattcctagaaccaggcgacctgcgactccttgacgttgacaatcgagtagtactcccgattgaagcccccattcgtataataattacatcacaagacgtcttgcactcatgagctgtccccacattaggcttaaaaacagatgcaattcccggacgtctaaaccaaaccactttcaccgctacacgaccgggggtatactacggtcaatgctctgaaatctgtggagcaaaccacaggtttcatgcccatcggtccctagnaaattnaatttccccttnaaaaaatcttttggaaaataaggggccccggtanttttaacccywtakyassccwaymccccctttwkarccmmmmmwwwwwwwarraaaagggsssggccn

SEQ ID NO: 147 - DNA, 920 bp, Homo sapiens
  misc_feature 15, 786, 794, 834, 845, 856, 899, 911: n = A,T,C or G
tgatacttcaagctngggaccgagctcggatccctagtaacggccgccagtgtgctggaattcgcggccgcgtcgacgaccgttgactattctctacaaaccacaaagacattggaacactatacctattattcggcgcatgagctggagtcctaggcacagctctaagcctccttattcgagccgagctgggccagccaggcaaccttctaggtaacgaccacatctacaacgttatcgtcacagcccatgcatttgtaataatcttcttcatagtaatacccatcataatcggaggctttggcaactgactagttcccctaataatcggtgcccccgatatggcgtttccccgcataaacaacataagcttctgactcttacctccctctctcctactcctgctcgcatctgctatagtggaggccggagcaggaacaggttgaacagtctaccctcccttagcagggaactactcccaccctggagcctccgtagacctaaccatcttctccttacacctagcaggtgtctcctctatcttaggggccatcaatttcatcacaacaattatcaatataaaaccccctgccataacccaataccaaacacccctcttcgtctgatccgtcctaatcacagcagtcctacttctcctatctctcccagtcctagctgctggcatcactatactactaacagaaccgcaaccttaacaccaccttcttcgaccccgccggaggaggagaccccattctataccaacacctattctgatttttcggncaccctgnagtttatattcttattctaccaggcttccggaataattcntcccatattgnaaacttaactncttcccgggaaaaaaaagaaaccatttgggataacataggggnttggggcttggngcctttgga

SEQ ID NO: 148 - DNA, 807 bp, Homo sapiens
  misc_feature 721, 727, 805, 806: n = A,T,C or G
gatccctagtaacggccgccagtgtgctggaattcgcggccgcgtcgmcactgaagatcctggtgtcgccatgggccgccgccccgcccgttgttaccggtattgtaagaacaagccgtacccaaagtctcgcttctgccgaggtgtccctgatgccaagattcgcatttttgacctggggcggaaaaaggcaaaagtggatgagtttccgctttgtggccacatggtgtcagatgaatatgagcagctgtcctctgaagccctggaggctgcccgaatttgtgccaataagtacatggtaaaaagttgtggcaaagatggcttccatatccgggtgcggctccaccccttccacgtcatccgcatcaacaagatgttgtcctgtgctggggctgacaggctccaaacaggcatgcgaggtgcctttggaaagccccagggcacctgtggccagggttcacattggccaagttatcatgtccatycgcaccaagctgcagaacaaggagcatgtgattgaggccctgcscagggccaagttcaagtttyctggccgccagaagatccacatytcaaagaagtggggcttcaccaagttcaatgctgatgaatttgaagacatggtggctgaaaaagcggctcatcccagatggcttgtggggtcaaagtacatccccatcgttggccctctggacaagtggcggggccctgcactcatganggcttncaatgtgctgcccccctctttaatactcaccaataaaattcttactttctgaaaaaaaaaaaaaaaaaaagggggggnnc

SEQ ID NO: 149 - DNA, 830 bp, Homo sapiens
  misc_feature 646, 745, 804, 827: n = A,T,C or G
gatccactagtaacggccgccagtgtgctggaattcgcggccgcgtcgacgcctatcatatagtaaaacccagcccatgacccctaacaggggycctctcagccctcctaatgacctccggcctagccatgtgatttcacttccactccataacgctcctcatactaggcctactaaccaacacactaaccatataccaatgatggcgcgatgtaacacgagaaagcacataccaaggccaccacacaccacctgtccaaaaaggccttcgatacgggataatcctatttattacctcagaagtttttttcttcgcaggatttttctgagccttttaccactccagcctagcccctaccccccaattaggagggcactggcccccaacaggcatcaccccgctaaatcccctagaagtcccactcctaaacacatccgtattactcgcatcaggagtatcaatcacctgagctcaccatagtctaatagaaaacaaccgaaaccaaataattcaagcactgctcattacaattttactgggtctctattttaccctcctacaagcctcagagtacttcgagtctcccttcaccatttscgacggcatctacggctcaacattttttgtaggccacaggcttccacnggacttcacgkcattwtttggctcaactttcctcactatcttgcttcattccgccaactaatatttcactttacatkccaaacatcmytttggcttyrnaagscgccgcctggatactggcatttttgtaaatgtggggtggactatttctggatggnctccatctattggaggaaggggnttt

SEQ ID NO: 150 - DNA, 674 bp, Homo sapiens
  misc_feature 60: n = A,T,C or G
gatccytrscttcaamrgacrcmartgyagywggwwttcrctytytyrcrtkgcacttanaaratggattatgattccagcaggcaaatctgcatattaaatatagacaacccaaccacagtatctgaacgttaaaagaaatctatcacgacagacattttacctagttataaataacgtaacaatagatcacactcagatttcttaaacagctcactcaggagtttcctcttttaaaaattaaataacttatggtacctcacacttatagcacatacacagttcatagctgaaacagcttcttaaaagcagaatgcacaatcacattgactttttcagcttctaaaagcttctttgtagatattaaactgccctcactacaaggcagtatgaacaagaactggattctgattctggtggcaacacaataactataaggcagtaagaacaagaactggattctgattctggcagcaacacaataactaaaacaccattcaccacatgacaaaacaaacaaatccaatgacaaaaaggaatcggaaaaaaagcagcaacagaaacagtrtgtggcaatcattcacataaggcccctcttccaccataccttatgatatacatcccttatagcatgacaatgtaccccaaggcaccttgaggcctcataataccac

SEQ ID NO: 151 - DNA, 843 bp, Homo sapiens
  misc_feature 6: n = A,T,C or G
cttggnaccgagctcggatccgttctctgcgatgacataatatgtgacgatcaagaattagactgccccaacccagaaattccatttggagaatgttgtgcagtttgcccacagcctccaactgctcctactcgccctcctaatggtcaaggacctcaaggccccaagggagatccaggccctcctggtattcctgggagaaatggtgaccctggtattccaggacaaccagggtcccctggttctcctggcccccctggaatctgtgaatcatgccctactggtcctcagaactattctccccagtatgattcatatgatgtcaagtctggagtagcagtaggaggactcgcaggctatcctggaccagctggccccccaggccctcccggtccccctggtacatctggtcatcctggttcccctggatctccaggataccaaggaccccctggtgaacctgggcaagctggwccttcaggccctccaggacctcctggtgctataggtccatctggtcctgctggaaaagatggagaatcaggtagacccggacgacctggagagcgaggattgcctggacctccaggtatcaaaggtccagctgggatacctggattccctggtatgaaaggacacagaggcttcgatggacgaaatggakaaaagggtgaaacasgtgctyctggattaaagggtgaaaatggtctttcaggcgaaaatggagctyctggacccatgggtccaaraagggsttcytggtgagcgaagacrgtcakgawcttkcttggggcttgcaggtggcttcggggtaaatgacgggggcttcgawrcrgttgcctt

SEQ ID NO: 152 - DNA, 634 bp, Homo sapiens
  misc_feature 4, 530, 619: n = A,T,C or G
gctnggaccgagctcggatccgatgaatggctggccagttactcagagtaatatgtttatgagttaaatggattgcataacggcaccacttttcctttgtcactgtggtggataaatgacaaagtagattccaatctcctgtatagaaaggtggttacccaatagcctcactggtggcttgctagcagagcctcaagttgcacctctgtggctttctgtaaattcgagtcctacagccacttcgagaacgctgcaatccccaaggcccacttggtccatgctgaagaagcggctgtgaccccaatcctgcctctcttttgctcttcagtattacttactggaggaatatgtaatattctaggtcaagtctaggagaggctcatcctaaaaaaaaaattgcaaagtcttttctcaattaaaacaaaaaagcctcaagyacatctcaatcatgtcaaaattatggttaaaaattgacattatgtagggaaatagcagcagagaatggctaatcttaaaaaataacgaaccanccaaccaaaaaacaaaacawawcaagaccawcaaaaaaaagtgccatcccacccctccccttgggtctttcattttggggggtatattnaaaraactcgagcct

SEQ ID NO: 153 - DNA, 896 bp, Homo sapiens
  misc_feature 3, 5, 811, 830, 883, 893: n = A,T,C or G
gcngngaccgagctcggatcctatatgtgccaagcccataactcagccactggcctcaataggaccacagtcacgatgatcacagtctctggaagtgctcctgtcctctcagctgtggccaccgtcggcatcacgattggagtgctggccagggtggctctgatatagcagccctggtgtattttcgatatttcaggaagactggcagattggaccagaccctgaattcttctagctcctccaatcccattttatcccatggaaccactaaaaacaaggtctgctctgctcctgaagccctatatgctggagatggacaactcaatgaaaatttaaagggaaaaccctcaggcctgaggtgtgtgccactcagagacttcacctaactagagacaggcaaactgcaaaccatggtgagaaattgacgacttcacactatggacagcttttcccaagatgtcaaaacaagactcctcatcatgataaggctcttacccccttttaatttgtccttgcttatgcctgcctctttcgcttggcaggatgatgctgtcattagtatttcacaagaagtagcttcagagggtaacttaacagagtatcagatctatcttgtcaatcccaacgttttacataaaataagagatcctttagtgcacccagtgactgacattagcagcatctttaacacagccgtgtgttcaaatgtacagtgggtccttttcagaagttgggacttctagactcaccctgttctyactccctgttttaattcaaccccagccatgcaatggccaaataataraaatgnttccttaccacttgaacangggaggaagtctggggcagtttttgacccttggtggtggaacatgggttaaanacaatgggtntcc

SEQ ID NO: 154 - DNA, 1088 bp, Homo sapiens
  misc_feature 644, 654, 679, 682, 726, 736, 870, 877, 889, 890, 891, 892,893, 894, 895, 896, 897, 898, 899, 900, 901, 902, 903, 910,912, 913, 928, 934, 940, 945, 954, 978, 996, 1015, 1032,1035, 1060, 1068: n = A,T,C or G
gatccaaaggtaatccaatgtcttttaaattaagcttgtgacaattaaaccaatacactgtagcaatgagaaaactattgacaaagtataaccagggaatattcatctcaatatatgctggaatctgaactttaagtaaaacaatgattacctgaagtagtacaaatggtaaccaggtactgagaaaacagacaatgagcttggataagaatatttttttagatctcacagtataactggagtgggatgaaaaaggaaaatataagatagtttcattcatataggaagttatcctgatagcctgtaccaaagtagtaacttcttcccaacaggttatgaaagctacaaataaaatcatcaccatgaaaaatgacagccagtaactctgaatgctgacatagaaaggacagtgacgagaataagcattctgtgccttcaggctttggtagatggctgggtctcccaaaacataagcaaggactgaaatccaaattaaaattactgtaaagaaataaaataatttttgacacttaaatgaaagcttggttgttttagagaaattcaggcaataatctatacaagctgtcaggaaamytggataatgcaaaargccataagtaaaggaaataatttggagtaaawanggcrgatgtnggwatttagkggaaccctaawggcnttnaaaaggtmccaaaaatccccttggaaatwtccaatwttttaatnggggaaaaanggtktttacccccaaaaaagkraaagawmaasgaawscycagyccgaaaattggcmttaarrkrtkssawwaaaakkkyyscamarrrrrwwtttcttyttwtyccymgtktaaarrawaaaattttttttggnaaacccngggggggggggnnnnnnnnnnnnnnnttttttncnnaaaaaatttcccccnctaaangggggnaaaangggggtttnttttttttaaaaaaaaaaaaaaantttttttcccccccccgntttttgggttcccaaaggnaaattggcccaaaaaanggntttaaacctttttttggggggcctnggtttttnttttggccggaaaacctggg

SEQ ID NO: 155 - DNA, 240 bp, Homo sapiens
gatccatctggagagacacgtcaccgtgttcagatagcctgtgtggccaatgtggttggtcttcagcttgcagttagccaggttccataccttgaccagcttgtcccagccacaggagacgatgatagggttgctgctgttgggcgagaagcggacacaagacacccactctgagtggctctcatcctggacagtgtatttgcacacacccagggtattccatagcttgatggttttatc

SEQ ID NO: 156 - DNA, 781 bp, Homo sapiens
  misc_feature 14, 754: n = A,T,C or G
cggcgcggagctcngatccyatgggcttcttgaatgcatatatgggcttcatcaactccttctgagctggaaagagtagcttccctgtattacctcccctactcccttatctgttgtgtattccacttaggaagaaatgcccaaaagaggtcctggccatcaaacataattctctcacaaagtccactttactcaaattggtgaacagtgtataggaagaagccagcaggagctctgactaaggttgacataatagtccacctcccattactttgatatctgatcaaatgtatagacttggctttgttttttgtgctattaggaaattctgatgagcattactattcactgatgcagaaagacgttcttttgcataaaagactttttttaacactttggacttctctgaaatatttagaagtgctaatttctggcccacccccaacaggaattctatagtaaggaggaggagaaggggggctccttccctctcctcgaatgacgttatgggcacatgccttttaaaagttctttaagcaacacagagctgagtcctctttgtcatacctttggatttagtgkttcatcagctgkttttagttataaacattttgktaaaatagatattggtttaaatgatacagtattttaggkatgatttaagactatgatttacctatacattatatatattttataaagatactaaaccaggcatacccttactctgccagagkagkgragctaattaaanccgttggttctggataaatggactaaa

SEQ ID NO: 157 - DNA, 591 bp, Homo sapiens
actatccctaacaacaaccatgggatttttgaagttatcccaaattcaatgcaaagcacttttatgtatcttccagttgtagattggaatagcaaaagtgaatgctatgaccaaaatttttgccctcctaaataaagacgtttccttctagagagcaaatctatcataaaatgtcaaaactagaagagaataaaatgaaaggaaaagcctagaaaaatatcctaaaatatcaaatgcagtcatttctaaatataagccataattatagctttacctattgttcttattgttcctatgctgcttctacaatgttacatcaactatacttagctttactctcccaaaatcttggtgatgaagccttctgagtgtgctttccaatgtgccagaaccagaagggcattccaaggcttccccacatttcctccatttacggagacagctgtttcactaacttgcagcacttgtaaatgctttgaaagctgatcacatattatattcttgacttaatactttggtaagcctggatatctatctttctataaacctcacctaatctttgatgttactataccttatctttgatttaac

SEQ ID NO: 158 - DNA, 273 bp, Homo sapiens
acttcagtgcctagtgtagtaactgaaatcttcaatgacacattaacatcacaatggcgaatggtgacttttctttcacgatttcattaatttgaaagcacacaggaaagttgctccattgataacgtgtatggagacttcggttttagtcaattccatatctcaatcttaatggtgattcttctctgttgaactgaagtttgtgagagtagttttcctttgctacttgaatagcaataaaagcgtgttaactttttgattgatgaaagaagt

SEQ ID NO: 159 - DNA, 330 bp, Homo sapiens
acctggagaagatcaaacagcgactgtttgagaaccttagaatgctgccgcacgcacctggggtccaaatgcaggcgattcctgaggacgccatccctgaggagagtggcgatgaggacgaagacgaccctgacaagcgcatctcgatctgctcctctgacaaacgaattgcctgtgaggaagagttctccgattctgaagaggagggagaggggggccgcaagaactcttccaacttcaaaaaagccaagagagtcaaaacagaggatgaaaaagagaaagacccagaggagaagaaagaagtcccgaagaggagaaaccaaggaggag

SEQ ID NO: 160 - DNA, 567 bp, Homo sapiens
acctttcattgcaggatttctgcttaatataacaagcaaaaacaaacaactgaaaaaatataaaccaaagcaaaccaaaccccccgctcaactacaaatgtcaatattgaatgaagcattaaaagacaaacataaagtaacttcagcttttatctagcaatgcagaatgaatactaaaattagtggcaaaaaaacaaacaacaaacaacaaacaaaacaaaacaaacaaacaaaaaatcccaccaatcttcatgggtaaactttcctgctcagggatgtaagctgactctagaccatctcgcggttcctgcggatagcacagcacaagatcatactgaagatcatgccaaatatctaggagataggaagaaacatgaggatcagggtggtttgatctgaaggaaggctgagggaaagggagagacatgggtcacccagtccaagaaaaatggcaaggagaatggcatccaggaggccaaacgagtcagaaggtgctgaagcaggagagatgcaggccagataatgagaagggtgcgggacgtgaggaatctgggggggttggcagtc

SEQ ID NO: 161 - DNA, 501 bp, Homo sapiens
acttgttgtgaaccaaaccagtgatactttgcagaattgcacattagaactagctacactaggggatctgaaacttgtggaaaagccgtctcctttgactcttgctcctcatgacttcgcaaatattaaagctaacgtcaaagtagcatcaacagaaaatggaataatttttgggtaatatagtttatgatgtctctggagcagcaagtgacagaaattgtgtggttctcagtgatattcacatcgacatcatggactatatccagcctgcaacttgcactgatgcagaattccgtcagatgtgggccgaatttgaatgggaaaacaaagtgacagttaacaccaacatggttgatttaaatgactacttacagcacatattaaagtcaaccaatatgaaatgcctgactccagaaaaggccctttctggttactgtggctttatggcagccaacctttatgctcgttccatatttggtgaagatgcacttgcaaatgtca

SEQ ID NO: 162 - DNA, 528 bp, Homo sapiens
accattctggagggctgtccactgtatagaacatttatgaatagaaggtaaggacactctgatgattcccacgaactaggaggattggtggtaggtccttagatagagcttctaaccatgccatgtagagagcactagacacagcaccttttcgtgcaactgggagactcatgacaataatattagctgtgcttgaatgttcctttaataactcatttaacctgatctgccggtatgtcttggacttataaagttcaagctcattatctgttattcgccatggttcatcttctttcattttatctgcaatatcttgctctttatcatcttcatgaagtctgtatggctcaatgatttcctcaaaagctataatattttctttctttggtttggtattgatatctcctagaaccatgatatcagaaaagtctatccggaacttgctaagcaaagtagccatcgctctccggtcatgggctattctgtttatctttccaccaatgaatactctgatcttacagtctttcc

SEQ ID NO: 163 - DNA, 537 bp, Homo sapiens
acagaagttttcatctatgaacatggcctcatcatcacctgcagccttggccttggcctgttcttcaaaaagctgccgctgccgcatgggatcattcagctcagtatacgcattgcatatctctttcttcatgacaaacagctcaaagcgctcagtcagaccctctttagagcggtgccatttagccaaagggctcattatctgtgggtgatcacagatgaatgtaggattgatgcaagtcacttccaggaactccccaacaagcttgtcaaggagcctggctgtggtccgaggtggagggcattcaacagcttttgccacacagatatcatcaagaattttgcgagtttcttcagtttcaaagaggttcgtttctggcagcttcatccccagggctttctcaagctcttctaccatgttgattcgccggaagggtggggtgaagtcaacatcgtaggcttggccctctgggccatctgggtggtaggtgaccttgtaactgcctgtaatatgcttcaccatccctgaaaccatctt

SEQ ID NO: 164 - DNA, 384 bp, Homo sapiens
acaatagagacgtcatgtttgctttctaaacatttgtttgactcctgacacaatggttttgctttggggtaacatgaaggttgccaaacttcaaagtaaaaaaaaagatattttctgacaaagcaaatgttcagttcagagttgcctgatgctgtcagcattccaagcaaactcaataggaagaggtgaagtcttcttcactgtataaccatcggcgtggctgcggtctactgcttcacatcccattctccagggaaaggaaaagtgctcgctatgatgcattgtttaaccaatgagtggtgagatgtgcctctttacctgagggcttccagactatagttcagccaccttgctctctgggtcatatgtagtcctgaagcatgt

SEQ ID NO: 165 - DNA, 529 bp, Homo sapiens
acagctcatccacttcctcatctgtaaaccgatcccccatggttgtcagcagctctctcaagtaatcttcctgtatggtgccagttgcttcttcatcaaagcaagcaaaggcatttctgatgacatcttcaggatctgtgccatttaacttctcaccaaacatggtgaggaacgtggtgaaattgatggggcctggagcctcattcatcatggcatctagatactcatcagttggattcttccccaatgaagcaagcatatcatgcaaatcttccttgtcgatgaaaccatctctgttctgatcaatcatgttgaaggcctctttgaactcctgaatctgtgactggtcaaacatggcaaacacattggatgttgcacgctgagggcgcttcttggtggtcttggtctttgcctttttgctcgacatggtggttgtttaattccgacgccaaacaccagaaccggggccgccctgcgcgagaccgcaaacgacagcgaagagcgttaggctgtggccggacagtggcgg

SEQ ID NO: 166 - DNA, 487 bp, Homo sapiens
actgtggatatttaaaatatcacagtaacaagatcatgcttgttcctacagtattgcgggccagacacttaagtgaaagcagaagtgtttgggtgactttcctacttaaaattttggtcatatcatttcaaaacatttacatcttggttggctgcatatgctttcctattgatcccaaaccaaatcttagaatcacttcatttaaaatactgagcggtattgaatacttcgaagcagaacaggcaatgtgcagccctcatttatgagaaaaccctcaggaaactcccagggtgatgcttggagaagctgtgagttgagctgaagctggagaacttcctccagagcaaagggcttaagaaagaaagaagaactctaagctgggtctgctaacatcactccagtttagatggatcttggcagagagacatgcttgttcctctggattggaaagatgatttactctcgggaatcttctctgtcagcctgt

SEQ ID NO: 167 - DNA, 562 bp, Homo sapiens
acaaagcagcaactgcaatactcaaggttaaaacattagaaaagcatttgtgtgacaggtatattacagtattatcaaaatattacattttcagacttacttagcagataatcatccaccagagcttaaatctttaaattatttccatagtcttaaaaaatatgtaatgtcagaatgcatataaaaagaatgtaaaaggaaacctaaaatacaaatggaataatgtaacaaataaatatttgatttcagtaactgttaataatcagctcaacaccaccattctctctaaactcaatttaattcttataggaataatgaactgtcaaatgccatggcataattatttatttccaagctatcatcaatgattagaactaaaaaaaatttggcataaaaaaatcacaattcagcataaataaagctatttttagcttcaacactagctagcatctctaagaattgttgaaataagtacctgcccgggcggccaagggcgaattctgcagatatccatcacactggcggccgctcgagcatgcatctagagggcccaattcgccct

SEQ ID NO: 168 - DNA, 579 bp, Homo sapiens
caaatggcctatgtctcagaagagctgggacctccttccagctgctgcagatgctgacaggccctgggaggctgctgtgctctggagaagctggagcagctcatttcttggcctagcctggctgcctcagaaagagcagtcaggacttgagggaagcatcaaattctatacccataaactgcagttggaagtcagctttttgaaatgtccagcctttgcccaattgtttcagatcatctcatgcctcaggctttggcaggtatcctgccctccatcttattccagtgtgttcacctcatcaaggcagcagagtggatgaaggagtaagtctgccctttgccatactgaacagctgtggaccccgattggtgagggctctgcatatgcctgtatgaaggagatacaggtgtgtgtgcacatgccggtatgaagaagacacaggcatgtgcttctcagttttgctaacagtgggagctcaacggggcagagggaggaaggtccatgatgctcagccacatactgtagagagaggcaatttaatgttaaatgacgcaccatcctccctcccacccttctccc

SEQ ID NO: 169 - DNA, 515 bp, Homo sapiens
  misc_feature 38: n = A,T,C or G
actggacatagtggtaaaggcttaacatgcaatatttnatttaaattctcacaaataatctatgagctgttgggacaaatgtggaaactccatacagagaggcttagtaatttgccaaaactcatacctaagtgaagagaaaaacaagatggaagcctgagaaaatagtcaggtcaggagtagtatttcaattattatcatcctctagatcatagagattcaatttaggagccaagttaggagccaagtagagctgaaggactgaccaaagtgtaagggacagggagaaacggcccgagtgggtttctggaggatgtgggaggagatgggaagtgcccaaaggccctgagagaaggcagtgctagcagctgccatctgcccagtgacgttgtccaagcacaggcatctggtggctgagagcttagagagaacaagatggaacgcataacatttgttcgtggaggaagatgtgaaaatgccgtctctgcccctctctcgtctgcccattgtaggtg

SEQ ID NO: 170 - DNA, 442 bp, Homo sapiens
acgcaaacaccagtaggtgttattgttagaactcgtgcaagcacagaaagatcccaggttccagaacggggctgtctgccagtggctgttgtcatgcgtgaagcaagtgaggccaggcaggctgcactcttcccccttcctctgccgtctcttctccttcctctccttcttcctcctacggttgttctccttgaaaagttgcagtttgctatctacttcctgagcagcctccttgaatgggtgaagatggctctttaatttctcttgctttttacacctttctctttattgtaatagctttgtttactgcagctacattcctcaggcttccttcccttcagatgtcctctcacttctcttaaattcttaattttatcttgcagagcttcaatctctttgtcaatgtatgccttatggtccttccacgctctggccgattggt

SEQ ID NO: 171 - DNA, 528 bp, Homo sapiens
  misc_feature 343: n = A,T,C or G
actttttagtttggggagatcacagtctacagactcatttacttatattaaacaagattaacctcattcaaaacttgctgcagtttataaattcacataaatacagaaatggatgcaattaaacaacttcaggatcttatttttaaaattcttagataattttttctgcaggctataattacctgctccagtcaccaatggttattgttcaatttaactacatcaattataaacctcttatatccttaaagaaaattttaagtgaaaattacaatttcttaccaaaaggtttagggttttccaaatttcaaatatttgcttccccctcccccctttccagtcnaacatttcaaataaactaaaaataaccacatctcacctgcaacattcaataatagcaatcacttgatgtataaaattttaactatgcccccagttattttaagacacaaaaaaatggctgcctaccaatctgtcttcacaagttagaaatactacatttaagatttaacatgagggtttcaagtt

SEQ ID NO: 172 - DNA, 536 bp, Homo sapiens
accgaccatagagcaagaatcaagattctgctaactcctgcacagccccgtcctcttcctttctgctagcctggctaaatctgctcattatttcagaggggaaacctagcaaactaagagtgataagggccctactacactggcttttttaggcttagagacagaaactttagcattggcccagtagtggcttctagctctaaatgtttgccccgccatccctttccacagtatccttcttccctcctcccctgtctctggctgtctcgagcagtctagaagagtgcatctccagcctatgaaacagctgggtctttggccataagaagtaaagatttgaagacagaaggaagaaactcaggagtaagcttctagaccccttcagcttctacacccttctgccctctctccattgcctgcaccccaccccagccactcaactcctgcttgtttttcctttggccataggaaggtttaccagtagaatccttgctaggttgatgtgggccatacattcctttaataaaccattgtgt

SEQ ID NO: 173 - DNA, 444 bp, Homo sapiens
gccaacttttcttaataccatataccttttaaaacacagtggcaggtaataagtggaagagaagaatgtttctgtctcttcctacgttgactgttcttattccactggtttctttagcaggactgttctactcagcctctgtggaagaaaacttcccacagggctgcactagcacagccagcctttgcttttacagcctgctcttgcctattaccataccagtgtatgtattcttccacctttggacttggatgggtattaaactcttcaggcataattgatgcaactagagtcaatatgctgtatatattaatgatagctcttgggcatcgatctctgaaagctcaaatggatggaatttagtttgcgggaaagaggctttgctttgcgcatatcaggcttaggactgtgggaggcttaagttgcagatgcttcttttattgt

SEQ ID NO: 174 - DNA, 383 bp, Homo sapiens
  misc_feature 45: n = A,T,C or G
actgggattatataggcatgagccactgagcctggcccagaagcntttttctcaaaggccctcagtgagataaattagatttggcatctcctgtcctgggccagggatctctctacaagagcccctgcccctctgttggaggcacagttttagaataaggaggaggagggagaagagaaaatgtaaaggagggagatctttcccaggccgcaccatttctgtcactcacatggacccaagataaaagaatggccaaaccctcacaacccctgatgtttgaagagttccaagttgaggggaaacaaagaagtgtttgatggtgccagagaggggctgctctccagaaagctaaaatttaatttcttttttcctctgagttctgt

SEQ ID NO: 175 - DNA, 473 bp, Homo sapiens
acttatttcaacaattcttagagatgctagctagtgttgaagctaaaaatagctttatttatgctgaattgtgatttttttatgccaaattttttttagttctaatcattgatgatagcttggaaataaataattatgccatggcatttgacagttcattattcctataagaattaaattgagtttagagagaatggtggtgttgagctgattattaacagttactgaaatcaaatatttatttgttacattattccatttgtattttaggtttccttttacattctttttatatgcattctgacattacatattttttaagactatggaaataatttaaagatttaagctctggtggatgattatctgctaagtaagtctgaaaatgtaatattttgataatactgtaatatacctgtcacacaaatgcttttctaatgttttaaccttgagtattgcagttgctgctttgt

SEQ ID NO: 176 - DNA, 537 bp, Homo sapiens
acaggtttcactattacaaatatatgatgttaaactaacaaactcatgaccttcaaagatgtcttcgtcccacgcacacacatttgtaatttgtgtccatttgctatttcccttcttctataatcttcaaattatatagttatgcattgagttccctatgcatctcacccatctcctttatctcagccttctcatactttgccattctcttctttctggaaataaccagcacaacaattccagcaacaactgctatcaccacaaccacaataacagcaataacaccagcttttagaccctgcattgagaattcaggtgctttttcatcaacataataaattaaagtttgaccaggatccagatccagttgttccccatttactgtcaggtccattttcttagaatgaaacaaggattcacctttaacatctttttcaaaataataagccacatcagctatgtccacatcattctgagttttttgagaagaattttgaaccagatcaatagtgataacattattctcatacaaaatac

SEQ ID NO: 177 - DNA, 372 bp, Homo sapiens
ggcccgctacgccctacagatggagcagctcaacgggatcctgctgcaccttgagtcagagctggcacagacccgggcagagggacagcgccaggtccaggagtatgaggccctgctgaacatcaaggtcaagctggaggctgagatcgccacctaccgccgcctgctggaagatggcgaggactttaatcttggtgatgccttggacagcagcaactccatgcaaaccatccaaaagaccaccacccgccggatggtggatggcaaagtggtgtctgagaccaatgacaccaaagttctgaggcattaagccagcagaagcagggtacacaaacatttcctacataatccaacatacaacagagaaatggt

SEQ ID NO: 178 - DNA, 638 bp, Homo sapiens
acattttactttccttctttcagaatgctaataaaaacttttgtttatacttaaaaaaaccataaatcagacaaacaaaagaaacgattccaacatcacttctgtgatgagaaaagaggcaatggaattcaacataagcaaagaaaactctacctggaggaaagaaatcgatcagcgaggaaacaactcggggctactgccagactgcaggccatgcgaggaggagcctcctagaggatttccaaagcaaacccatccctgccagaccaggaagcagccgtcctacctcccagagaaacagacctcagccctaatgatcactcaaatccgagtcaatccctctatttaaaaaaagctcacacatagtctcccctcccttccccagtcctcttggcgacagggcggtcacaggacatatgtgttcttcaccagctgctccttgtcatctccggagctccagacggtgcgcagggcacgctcctggttcctccgtgccacccggatcaggtagaccatggaggctcccaggaagaggatcaacaccatcacgaacagccccgccagaaccaccacctttgagccaaggggcaggggaggattctcctgctggcggaagcagcggagcatgcaggcctcct

SEQ ID NO: 179 - DNA, 354 bp, Homo sapiens
acatgatgtcagttcctttgcgccctgactgcatcatcatgcggcggcgaacggtgtcaaatggataggaagtcaacccggcaacagcagtgacagtctgtgcgatcatccagctgatgacgatgtgagtgttcttgggatccggaagcattccctttgcagtgtcatagataccgaagtaggcggctcggtagatgataataccctgcacagacacgttaaagccttggtacctgcccgggcggcaagggcgaattctgcagatatccatcacactggcggccgctcgagcatgcatctagagggcccaattcgccctatagtgagtcgtattacaattcactggccgtcgtt

SEQ ID NO: 180 - DNA, 350 bp, Homo sapiens
tgaaatacatatatttcataaggttcagttacaaaatggattgtttcaaatggcaatttcttacactaacctgattatgaaaaaaagaagtctgtatcatctgcttccaagtctgttatgtccaaatatattttaattatgcatttattttgctacttttataaatattagagatttcaccttaaattatttttgtaactagttctagaacatgttttccaattattatttttctaatggagacatataattgacctatgtttatgcatatatgttctctacacagtgaaactttttttaaaaagaatagtaaagaaaatgcggaagctctggctctccaaggcaaagtc

SEQ ID NO: 181 - DNA, 482 bp, Homo sapiens
actatatacatttagtatatcgccccctacaggaagtctaaaatacattttagaaaattttataatcaaaaaaaaggatgaatgatttattttatttatctgacaaaaattcagccctaggctattgacagctgcagttctcctatccacttccacataatttttaaaatgtgaatgccaggaatggtgctgttgatatgaatattaggacaaggagcagacgtttcatcaggactaggtgtctctggcggagtctgtggaggaataaacaaagatactcgtgcaatgttggatatttctgatttcagatcgaccttatcaacagcttgaatagcaatgaaaagatctgtgccattttcaaaagtaatgttttctggtttaaacaaaaagacttcctcagagttggcttcctttgggatgagagcagtagtattcacttgaagagattcattgaacttgtctctgagatcaagaatacttgt

SEQ ID NO: 182 - DNA, 347 bp, Homo sapiens
acatgctcatgacagcaacaacccattgaccacttcttcaaagtagttcactgccaaggagaatcaaaattcaatttggattcccaatactcagcctaccttcaatttcccatcaagcctatattcttagcctttagtttaagtgtgggttatcttaacagctcacttggcctcagttcaaagtgaaatttcctgagtccttgaaagaagtagaaacccaatcaatgagtttttctcttggtctctactttgtgagaaggatacatttctagaaatttcaataccttccaagtgtcagaaggaaatataatgtagctgttgaaatttgcgatgtaggataataaggt

SEQ ID NO: 183 - DNA, 301 bp, Homo sapiens
acaagactcaagtaaatagaaaggcagctttcaatcacaaatcagtttttcagattttactgtggaagcatatttaatgcacacatttgaatgttacacataaataattttaacgatggagtccaagttctggattttacattagatctgcatatataagacacttgtggtcaaatttcaagattggtaaagccagtttcaagctgcttatattttgagtacctgcccgggcgcgctcaagggcgaattccagcacactggcggccgttactagtggatccgagctcggtaccaagcttgg

SEQ ID NO: 184 - DNA, 609 bp, Homo sapiens
  misc_feature 79: n = A,T,C or G
actgatgcaacagttgggtagccaatctgcagacagacactggcaacattgcggacaccctccaggaagcgagaatgcngagtttcctctgtgatatcaagcacttcagggttgtagatgctgccattgtcgaacacctgctggatgaccagcccaaaggagaagggggagatgttgagcatgttcagcagcgtggcttcgctggctcccactttgtctccagtcttgatcagctgcacatcactcaggatttcaatggtgcccctggagattttagtggtgatacctaaagcctggaaaaaggaggtcttctcgggcccgagaccagtgttctgggctggcacagtgacttcacatggggcaatggcaccagcacgggcagcagctggcaccttattggccagcaacatgtccctgatctcagtgaggtcctccttggtgaacacaaagcccacattcccccggatatgaggcagcagtttctccagagctgggttgttttccaggtgccctcggatggccttgcgcatcatggtgttcttgcccatcagcaccacagccttcccgcgaagggacatgcggatctgctgcatctgcttggagcccaca

SEQ ID NO: 185 - DNA, 559 bp, Homo sapiens
  misc_feature 549, 552: n = A,T,C or G
actacatatttcagcactaaggcggttgcttcactttatatctatataaaaaaagtggtaaaaatcttttccttttgtgcagttgaacccatcctacattcagattctctcaagcactaataaaatacttatttggttgaggaagatttaaggcaagttcgggcccttccaaaggcactgtgagactccccccccactccccgttattgctacatgtctttatactcgagtatgtcacagtagaactggtggaataagcaaacacttttttgctagtttataaagttggaattagaaaagcatgccacatttcagcctgattgcaaagtatgtggtcatttttttctttgaagttggatgggctacaacctttatacattctaagaaaactcataggatgttcctcaaactacttccacagcatcaagatcgatttctgtcaagaaatcatgcaatctttcaaaatttacgtaaacaaggaaagaaattaatgaaataaatattacatacaatctcttaaattaagaattttgtacctgcccgggcggncgntcaaggg

SEQ ID NO: 186 - DNA, 537 bp, Homo sapiens
  misc_feature 529: n = A,T,C or G
attttggcctctctgggatagaagttattcagcaggcacacaacagaggcagttccagatttcaactgctcatcagatggcgggaagatgaagacagatggtgcagccacagttcgtttgatgtccaccttggtcccttggccgaacgtcccgggggcactgttatatttttgacagaaataagttgcaacatcttcaggctgcaggctgccgatggtgagagtgaaatgtgtcccagatccactgccactgaaccgagatgggaccccagattgcaaagtggatgcagcatagatcaggagcttaggaacttttcctggtttctgctgataccaggctaaataattgctaatgccctgactcgcccggcaagtgatggtgactctgtctcctacagatgcagacagggaggatggagactgggtcatctggatgtcacatctggtatctgggagccagagcagcaggagtcccaggagctgagcagggaccctcatgtccatgctgtgtcctgacctgcccgggcggncgctcaag

SEQ ID NO: 187 - DNA, 549 bp, Homo sapiens
acatatacaaaataatgcatacatgataaaacagaaaaagagtagtccttaaactcaatatatcataaaggtattactatattaacatgtctacaagcagcgtgtaacagggttaagagacattaaggcaataatacttgaagcttcaaaataaaccatatgtaatactttttcctaagtgtagtataaggcaggtagatggtcccagcaaaaaatattaaggtaacaatctacactgctgttagtcccacatattaaagatggaatactataaatctggctttcagtggcacctgaattttccagtataacttaaagtgtcttctagctccctgaatcatgtccattctgaaggtggatctcttggtcctttgggttttccacatcgattaccaaaaccaatatctgtggcttctgttggattttctgatatttgttctctcttgtcactgaaagtaggtggacattctatgcacatttcatagtgaatacctcccgctggatgatcacatttctcattttcagaggttatcaagccttcagactttt

SEQ ID NO: 188 - DNA, 383 bp, Homo sapiens
acacatctctctcagccgcagaaatgaagacatctttcaccagccgcatggctctgtccaaggacagcggaacatgctccacattctgcatgttcttaaaaccaacctggttgtcaagcaggggctgtagcatggcacttgctgagcctccagccttgaaggagtctctctggtaagaccctactggatcaaagctgtatacagccccctttccttcttcatcaagtccaccgatgatgttgtaaacatagtatggaaagaagcgccttgaatacaggattgtagacagcattgcagcaattgcccccgtagtcatggccttattattggaatgtttatacatctttagtcttgcttcaataatctttgtcagcgtaagacag

SEQ ID NO: 189 - DNA, 509 bp, Homo sapiens
acctagtcagatggtagacgagctgtctgctgccgcaggagcacctctatacaggacttagaagtagtatgttattcctggttaagcaggcattgctttgccctggagcagctattttaagccacctcagattctgtctaaaggggttttttgggaagacgttttctttatcgccctgagaagatctaccccagggagaatctgagacatcttgcctacttttctttattagctttctcctcatccatttcttttatacctttcctttttggggagttgttatgccatgatttttggtatttatgtaaaaggattattactaattctatttctctatgtttattctagttaaggaaatgttgagggcaagccaccaaattacctaggctgaggttagagagattggccagcaaaaactgtgggaagatgaactttgtcattatgatttcattatcacatgattatagaaggctgtcttagtgcaaaaaacatacttacatttcagacat

SEQ ID NO: 190 - DNA, 496 bp, Homo sapiens
actcatttacaataaaataaccaagtgaagttacaaaaggcatatattactgtgaaaagaacatacactccacattttgccgattaataatggcaatcataatttaacataataaaagaatatatatctattgcttttcatcatacttgataaatacagtatgaacaaaattttcattgtatacttttcacaagataataaataagttaaatagttttcatattgagttgtggtgcagtggtgcgaatcaactcaaaacagctaaaaattcagcagttattctccaacaattacaaagtaagctctgcgcaaggcttccagagggagcagacaaaatggttctaaactgaacatccactaagtggtggcaatgaaaccaagtaaccagtatggacctttggaatgcaagggttttttcacccccagacatatataattctgttaaaaaacaaaaaacacctatgggctgagggctaactatcaaggcatattcttg

SEQ ID NO: 191 - DNA, 389 bp, Homo sapiens
acccattctgttttcccccagcaacgcccctccaaacctccagcctccctgtctccagctgcctgggcccggaagggctttggttccttctctgggtctgattttctcactgaactccaccgaccaactgccctaagcccccagggcctccagggcccaggttcgagacccaaacccccaaaatccaaaacttctcttgaaaagttcagggaccgtccaggggagatggggaggagatatggagtgagtcacctgctccagaagatgccagcttctctctccagggtgcttagttggctttgcccacccctcactccccagggagctctggggacagcttcctcacacccctgtcccacccacacagctgccctagctgaccccgagaa

SEQ ID NO: 192 - DNA, 421 bp, Homo sapiens
cgaggtttaaaacccaaacttccaaaggtttaaactacctcaaaacactttcccatgagtgtgatccacattgttaggtgctgacctagacagagatgaactgaggtccttgttttgttttgttcataatacaaaggtgctaattaatagtatttcagatacttgaagaatgttgatggtgctagaagaatttgagaagaaatactcctgtattgagttgtatcgtgtggtgtattttttaaaaaatttgatttagcattcatattttccatcttattcccaattaaaagtatgcagattatttgcccaaagttgtcctcttcttcagattcagcatttgttctttgccagtctcattttcatcttcttccatggttccacagaagctttgtttcttgggcaagcagaaaaattaaattgt

SEQ ID NO: 193 - DNA, 159 bp, Homo sapiens
cctgggctgagagtggatggaatggatatcctgtgcgtccgagaggcaacaaggtttgctgctgcctattgtagatctgggaaggggcccatcctgatggagctgcagacttaccgttaccacggacacagtatgagtgaccctggagtcagttaccgt

SEQ ID NO: 194 - DNA, 549 bp, Homo sapiens
ggcagccaccacgggctcgggagtaaaagtccctcgcaatttccgactgttggaagaactcgaagaaggccagaaaggagtaggagatggcacagttagctggggtctagaagatgacgaagacatgacacttacaagatggacagggatgataattgggcctccaagaacaatttatgaaaaccgaatatacagccttaaaatagaatgtggacctaaatacccagaagcacccccctttgtaagatttgtaacaaaaattaatatgaatggagtaaatagttctaatggagtggtggacccaagagccatatcagtgctagcaaaatggcagaattcatatagcatcaaagttgtcctgcaagagcttcggcgcctaatgatgtctaaagaaaatatgaaactccctcagccgcccgaaggacagtgttacagcaattaatcaaaaagaaaaaccacaggcccttccccttccccccaattcgatttaatcagtcttcattttccacagtagtaaattttctagatacgtcttgtagacctcaaagt

SEQ ID NO: 195 - DNA, 515 bp, Homo sapiens
acctctgctatttgctgttattttatctgctatgctattgaagttttggcaattgactatagtgtgagccaggaatcactggctgttaatctttcaaagtgtcttgaattgtaggtgactattatatttccaagaaatattccttaagatattaactgagaaggctgtggatttaatgtggaaatgatgtttcataagaattctgttgatggaaatacactgttatcttcacttttataagaaataggaaatattttaatgtttcttggggaatgtgttagagaatttccttactcttgattgtgggatactatttaattatttcactttagaaagctgagtgtttcacaccttatctatgtagaatatatttccttattcagaatttctaaaagtttaagttctatgagggctaatatcttatcttcctataattttagacattctttatctttttagtatggcaaactgccatcatttacttttaaactttgattttatatgctatttattaa

SEQ ID NO: 196 - DNA, 174 bp, Homo sapiens
  misc_feature 54, 55, 59, 144, 171, 174: n = A,T,C or G
acagtggtccttttcagagttggacttctagactcacctgttctcactccctgnnttanttcaacccagccatgcaatgccaaataatagaattgctccctaccagctgaacagggaggagtctgtgcagtttctgacacttgntgttgaacatggctaaatacaatgggnatn

SEQ ID NO: 197 - DNA, 405 bp, Homo sapiens
  misc_feature 271, 285, 356, 390, 395, 397: n = A,T,C or G
gttaccattaagttcctctaaaaagtttttcttcctctcttcagagccaaaataaaagtgaactacactgttcagataaggtcacaatctgatgctgtcagtttgaccgagctggttttgcttatggtcatgctgcaatttgttagaataatagggatcaagttttaaatcctcctccttcccttttttctggagtcttgagggccagagtttttgtttttgtttttgttttttttttcctgcttgctactgttttggggggttgaaaagnggtttaaacctganactaacttaaacacttccttgaccttcttgttgcctgttcatttttgtgccaaggaagtagctgccccagngtatgtcttgccttctccgcgtcattgttggaanaggananatgcatcg

SEQ ID NO: 198 - DNA, 441 bp, Homo sapiens
  misc_feature 19, 405: n = A,T,C or G
actgggcctaatcgctacntgcctctttggctatgatgcctatgtcaccttccccgttcggcagccaagacatacagcagcccccactgaccccgcagatggcccggtgtaggcgaacttccctcatttctctctgcaatctgcaaataactcctccattgaaataactcctccccaccccaacaacattcccagcagaccaactcccaccccctctttgaggtaaaagtgcctttattgggagacttttgtcttccagcctgccaatcaaccctcctgggtgtggccaccatatgtgtgtgcctaggtcctccttctgcacgatccaataggagacaccagttctgactgaaccatgcccccacctaagtcacaaaatgagggaagtggggagttagatttcanagtccaggccctaggttgggacccactccaaataat

SEQ ID NO: 199 - DNA, 403 bp, Homo sapiens
acttggtaaaggccttcttcttagatttatgccaattcttatagaaacgcctcttgcattcatcactgatgtgctcagcaaagacagtcttgaaggtccggaggcctcgaggggtttccacgtagcccacaatgcccacaaccaccatgggtggtgtctctacaatggtcacagcctccaccacctccttcttgttcaccttggatcccggcctgtcgacttcccgcacgatgtgagtcatgccagccttgtatcccaggaaggctgtgaggtggaccggcttggacgggtcatccttagggaagctcttcaccttcccacgatgcctgctgctgcgcttccgaggcaggaagccgagggacccatgtctgggagcggagaactttctgtgagacatcacgcc

SEQ ID NO: 200 - DNA, 487 bp, Homo sapiens; identical to SEQ ID NO: 166

SEQ ID NO: 201 - DNA, 637 bp, Homo sapiens
acctttcattgcaggatttctgcttaatataacaagcaaaaacaaacaactgaaaaaatataaaccaaagcaaaccaaaccccccgctcaactacaaatgtcaatattgaatgaagcattaaaagacaaacataaagtaacttcagcttttatctagcaatgcagaatgaatactaaaattagtggcaaaaaaacaaacaacaaacaacaaacaaaacaaaacaaacaaacaaaaaatcccaccaatcttcatgggtaaactttcctgctcagggatgtaagctgactctagaccatctcgcggttcctgcggatagcacagcacaagatcatactgaagatcatgccaaatatctaggagataggaagaaacatgaggatcagggtggtttgatctgaaggaaggctgagggaaagggagagacatgggtcacccagtccaagaaaaatggcaaggagaatggcatccaggaggccaaacgagtcagaaggtgctgaagcaggagagatgcaggccagataatgagaagggtgcgggacgtgaggaatctgggggggttggcagtcagttgcacaagcattttccttggagaactttcagggtgggaaagtaagctcagggccaaatttaatgctc

SEQ ID NO: 202 - DNA, 169 bp, Homo sapiens
ctctgctctccgacctctctcctctgaaaccctcctccacagctgcagcccatcctcccggctccctcctagtctgtcctgcgtcctctgtccccgggtttcagagacaacttcccaaagcacaaagcagtttttccccctaggggtgggaggaagcaaaagactctgt

SEQ ID NO: 203 - DNA, 511 bp, Homo sapiens
acatgatatattatttaaatacaggataaaacaaagatacgtttaatgattttcgtctcattttaaagtcaccttattgaacgatacatcatgaaatctatagttgtacagctcatccacttcctcatctgtaaaccgatcccccatggttgtcagcagctctctcaagtaatcttcctgtatggtgccagttgcttcttcatcaaagcaagcaaaggcatttctgatgacatcttcaggatctgtgccatttaacttctcaccaaacatggtgaggaacatggtgaaattgatggggcctggagcctcattcatcatggcatctagatactcatcagttggattcttccccaatgaagcaagcatatcatgcaaatcttccttgtcgatgaaaccatctctgttctgatcaatcatgttgaaggcctctttgaactcctgaatctgtgactggtcaaacatagcaaacacattggatgttgcacgctgagggcgcttcttggtcttggtc

SEQ ID NO: 204 - DNA, 514 bp, Homo sapiens
  misc_feature 506: n = A,T,C or G
tttgaaggcaaaattgcaaatcttgaaattaagagggcaaaaatgtaaaggagtcaaaactataaatcaagtatttgggaagtgaagactggaagctaatttgcattaaattcacaaacttttatactctttctgtatatacattttttttctttaaaaaacaactatggatcagaatagccacatttagaacacttttgttatcagtcaatatttttagatagttagaacctggtcctaagcctaaaagtgggcttgattctgcagtaaatcttttacaactgcctcgacacacataaacctttttaaaaatagacactccccgaagtcttttgttcgcatggtcacacactgatgcttagatgttccagtaatctaatatggccacagtagtcttgatgaccaaagtcctttttttccatctttagaaaactacatgggaacaaacagatcgaacagttttgaagctactgtgtgtgtgaatgaacactcttgctttattccanaatgctgt

SEQ ID NO: 205 - DNA, 627 bp, Homo sapiens
actcttggtttatcaatgggacgttccagcaatccacacaagagctctttatccccaacatcactgtgaataatagcggatcctatatgtgccaagcccataactcagccactggcctcaataggaccacagtcacgatgatcacagtctctggaagtgctcctgtcctctcagctgtggccaccgtcggcatcacgattggagtgctggccagggtggctctgatatagcagccctggtgtattttcgatatttcaggaagactggcagattggaccagaccctgaattcttctagctcctccaatcccattttatcccatggaaccactaaaaacaaggtctgctctgctcctgaagccctatatgctggagatggacaactcaatgaaaatttaaagggaaaaccctcaggcctgaggtgtgtgccactcagagacttcacctaactagagacaggcaaactgcaaaccatggtgagaaattgacgacttcacactatggacagcttttcccaagatgtcaaaacaagactcctcatcatgataaggctcttacccccttttaatttgtccttgcttatgcctacctctttcgcttggcaggatgatgctgtcattagtatttc

SEQ ID NO: 206 - DNA, 192 bp, Homo sapiens
  misc_feature 151, 192: n = A,T,C or G
aaggcccaggccctggaccacagctgctcctgctacaaagaggagaaaaccagccagcgtgaggtggtcctgagctgccccaatggcggctcgctgacacacacctacacccacatcgagagctttacctcccccggaccctctgagcctnctaagctcggcttcctctcttcagatatttattgtttgaan

SEQ ID NO: 207 - DNA, 533 bp, Homo sapiens
tgaaggacaagctcccctacccttatgatgacccattttccctcatgaccgatcccaagctcatcatttggagccctgtgcgccgctcagatgtggcctggaactttgagaagttcctcatagggccggagggagagcccttccgacgctacagccgcaccttcccaaccatcaacattgagcctgacatcaagcgcctccttaaagttgccatatagatgtgaactgctcaacacacagatctcctactccatccagtcctgaggagccttaggatgcagcatgccttcaggagacactgctggacctcagcattcccttgatatcagtccccttcactgcagagccttgcctttcccctctgcctgtttccttttcctctcccaaccctctggttggtgattcaacttgggctccaagacttgggtaagctctgggccttcacagaatgatggcaccttcctaaaccctcatgggtggtgtctgagaggcgtgaagggcctggagccactctgctagaagagaccaataaa

SEQ ID NO: 208 - DNA, 381 bp, Homo sapiens
  misc_feature 377: n = A,T,C or G
aattggactggctggctggattctggaaaacccaactttcacaaaccaggtggagacacagaattgattggagacgtctgtggaccaggctgggcagctaacatctcttgcagagccaccatgtatcctgatgttcccattggacagcttggacaaacagtggtgtgtgatgtctctgtggggctgatatgcaaaaatgaagaccaaaagccaggtggggtcatccctatggccttctgcctcaactacgagatcaacgttcagtgctgtgagtgtgtcacccaacccaccaccatgacaaccaccaccacagagaacccaactccgacaccaatcaccaccaccactacggtgaccccaaccccaacacccaccancaca

SEQ ID NO: 209 - DNA, 343 bp, Homo sapiens
acaactagaaaatagtgtgggatattgaattatgggaggctctgactgtctcgggtgtcagcttaacattccacagatggggggttagtttttatatcctataatacaaagcatattaaatggcaatatggagtcagtcctgcatttaatgtcttgaacattttaaattacttctattaccatgttgttttttagtagaattgtttcctaaagaaaaccactctttgatcatggctctctctgccagaattgtgtgcactctgtaacatctttgtggtagtcctgttttcctaataactttgttactgtgctgtgaaagattacagatttgaacatgtagtgt

SEQ ID NO: 210 - DNA, 358 bp, Homo sapiens
accctctttcccttcccaccccccaattaaaggcaaacaatggcactttgctcttgcttaacctagattgtcttcaaaaactattaaaatgtaaaagacttaacaaaaaaacaaaaagacgtttaacagatgtcaaaaagctccttagtgtttgaaaataaatgcttaaacaaaagacaacatattttatatcaaacaagtttgaagagccctgaattgcagcattctgtaacataaacaaacaaaaagctggtataggatttattgtcaaaggcagaatttcttcaggcaggtaagtaaggaggtggtggttctttttcaggcattttcacggccatttcataggttggcaaaacgt

SEQ ID NO: 211 - DNA, 29 bp, Homo sapiens
  misc_feature 1: n = A,T,C or G
naacagacctcaaatgcacccccatttac

SEQ ID NO: 212 - DNA, 350 bp, Homo sapiens
acccatcatgcccactgcaggcacaactccagatgaagactatgaatatatgaatcggcaacgagatggaggtggtcctgggggtgattatgcagccatgggggcctgcccagcatctgagcaagggtatgaagagatgagagcttttcaggggcctggacatcaggccccccatgtccattatgcccgcctaaaaactctacgtagcttagaggctacagactctgcctttgataaccctgattactggcatagcaggcttttccccaaggctaatgcccagagaacgtaactcctgctccctgtggcactcagggagcatttaatggcagctagtgcctttagagggt

SEQ ID NO: 213 - DNA, 518 bp, Homo sapiens
tgaagctgatggggtcaaatgaaggtgaattcaaggctgaaggaaatagcaaattcacctacacagttctggaggatggttgcacgaaacacactggggaatggagcaaaacagtctttgaatatcgaacacgcaaggctgtgagactacctattgtagatattgcaccctatgacattggtggtcctgatcaagaatttggtgtggacgttggccctgtttgctttttataaaccaaactctatctgaaatcccaacaaaaaaaatttaactccatatgtgttcctcttgttctaatcttgtcaaccagtgcaagtgaccgacaaaattccagttatttatttccaaaatgtttggaaacagtataatttgacaaagaaaaatgatacttctctttttttgctgttccaccaaatacaattcaaatgctttttgttttatttttttaccaattccaatttcaaaatgtctcaatggtgctataataaataaacttcaacactctttatgataacaaa

SEQ ID NO: 214 - DNA, 501 bp, Homo sapiens
  misc_feature 361: n = A,T,C or G
actcttgaatacaagtttctgataccactgcactgtctgagaatttccaaaactttaatgaactaactgacagcttcatgaaactgtccaccaagatcaagcagagaaaataattaatttcatgggactaaatgaactaatgaggataatattttcataattttttatttgaaattttgctgattctttaaatgtcttgtttcccagatttcaggaaactttttttcttttaagctatccacagcttacagcaatttgataaaatatacttttgtgaacaaaaattgagacatttacattttctccctatgtggtcgctccagacttgggaaactattcatgaatatttatattgtatggnaatatagttattgcacaagttcaataaaaatctgctctttgtatgacagaatacatttgaaaacattggttatattaccaagactttgactagaatgtcgtatttgaggatataaacccataggtaataaacccacaggt

SEQ ID NO: 215 - DNA, 393 bp, Homo sapiens
aaaaaatcaactctaaatgatgataattttgtacagttttatataaaactctgagaactagaagaaattattaactttttttcttttttaattctaattcacttgtttattttgggggaggaagactttggtatggagcaaagaaataccaaaactactttaaatggaataaaaccaactttattcttttttcccccatactggtagataaagcaaactttataagtgggctattgaaagaaaagttacaagcttaagatacagaagcatttgttcaaaggatagaaagcatctaaaagtttaggctcaagatcaatctttacagattgatattttcagtttttaatcgactggactgcagatgttttttcttttaacaaactggaattttca

SEQ ID NO: 216 - DNA, 531 bp, Homo sapiens
ttttttttgggaatttccacccacaattttattattactgaaagcatttggaatgaagcaaaggatttaacaatatatataaaaatatacattttttaaaaaatcgcaagtagacaatagatttatggaattatttttctgatcatccagaaaagatagcaatagtaaactgcagttgggtgagaccagccactgggccatgagacctaagcagccctaacgctgcctgagctctcaagagtagaagaaatgctcgacaaacagaaggaggctgtgggagggcagcaggacagccccaccagaaaaccagagcccgaatgggctgggcagggccagggctgaggtatcgggatgcaggaacaaccaggaaccccatgtgtgttgaggagacatgccaattattctggcctggagaggaattaccaggacacaagaactcagaccatctgcaagcaagctcccttgtgtgtgttcactttaaatcaattcgtgtttaactcactgaatgaatacgtgggtttgggtgggaat

SEQ ID NO: 217 - DNA, 490 bp, Homo sapiens
accatgatagaatactgcaattgtggtcagaattacagtatgcacaaagaattaattagcattattaaagagtcctcactaaacatttcatatgatcacactgaagaactgtaacattccatagagtgaagtggttcaaatttctcttggaatttttacttttgtgggccttattttatgatccttttcatatttcttttgacttagagtattaatacatggccaaaataatttagttactacctcatacaaacaatataatggttactacacatcacaggaacttagttttggtttaagtcatttttgattgcttttttccaatggaatatgtatataccaggttttagcaaaatgcacacttttggctctttttggtatatgttctttatattttaatgtgagtatatacactaagaacaaactaaattgtgatttatgatcttcatttattttaatggtaatggttttaaaatatgttcctgattgt

SEQ ID NO: 218 - DNA, 435 bp, Homo sapiens
ggccctgggaggcttctttacttactttgtgattctggctgagaacggcttcctcccaattcacctgttgggcctccgagtggactgggatgaccgctggatcaacgatgtggaagacagctacgggcagcagtggacctatgagcagaggaaaatcgtggagttcacctgccacacagccttcttcgtcagtatcgtggtggtgcagtgggccgacttggtcatctgtaagaccaggaggaattcggtcttccagcaggggatgaagaacaagatcttgatatttggcctctttgaagagacagccctggctgctttcctttcctactgccctggaatgggtgttgctcttaggatgtatcccctcaaacctacctggtggttctgtgccttcccctactctcttctcatcttcgtatatgacgaagtcagaaa

SEQ ID NO: 219 - DNA, 538 bp, Homo sapiens
caggacgaaaacagaaccaatctaaaaatggctgatgttactttaggagcctgaaaaaaacaggagatccttgaagacccagccaccccttctagaatgttcaataagggcacctttccaaagctactaagcaggcacttggcatttcaggagtttgtcttatggttgcataaaagtatccctttcacccagacctggcaccctttatggttcaaagttaagaacgggaagaatgggtggcaaggtggctcctggaagagctcacccagcacagctgccctgagctcggggccttggtttctgtccctggggatatttatatttaataaatttttatataaatacacagagaaatagaaaatataaaatctgaggggttggggaagaaacgtgagggactcagcaggaagccagagctggagaggtccattcaggccaacttgacctcctccttgacccctttggcttctggcttctcctccttggttttctcctcttcggtgacttctttcttctcctctgggtctttctctttttc

SEQ ID NO: 220 - DNA, 276 bp, Homo sapiens
gccagatcgggaacaaatgaatctgtggatgcatcaacctatcgtcagtcaaacccctttaaaatgttgctttggctttgtaaatttaaatatgtaagtgctatataagtcaggagcagctgtctttttaaaatgtctcggctagctagaccacagatatcttctagacatattgaacacatttaagatttgagggatataagggaaaatgatatgaatgtgtatttttactcaaaataaaagtaactgtttacgttggtaaaaaaaaaaaaaaaa

SEQ ID NO: 221 - DNA, 200 bp, Homo sapiens
acagggtgaggtctccgtcctggaacttggggagctgcccgtataggcaggaggctttgagtgagccctcctgccacgtctccacggtcaccacctcctccttccagctctggccctgatctgccagcagcatgcgcagggccgcgcagcggcctcgaactgggaaatagaccacggtgtagggcggcatggtggcgaag

SEQ ID NO: 222 - DNA, 401 bp, Homo sapiens
  misc_feature 213, 230, 301: n = A,T,C or G
acacgcaggcatgcacgggtttcctgcccagcgacggcttaagccagcccccgactggcctggccacactgctctccagtagcacagatgtctgctcctcctcttgaacttgggtgggaaaccccacccaaaagccccctttgttacttaaggaattcccttccctgactcccgagggctagggctagagcagacccgggtaagtaaaggcanacccagggctcctctancctcatacccgtgccctcacagagccatgccccggcacctctgccctgtgtctttcatacctctacatgtntgcttgagatatttcctcagcctgaaagtttccccaaccatctgccagagaactcctatgcatcccttagaaccctgctcagacaccattacttttgtga

SEQ ID NO: 223 - DNA, 494 bp, Homo sapiens
  misc_feature 487: n = A,T,C or G
acagacttctggaggactgtggactgagtgcatagcacagctcagtcctgagcagcaggccgccattcaggagctcctgaactctgcgtgaagggccttaatgtcacccaccagaaaactaactccaaataaacgcttaccctttcctttaggtttctttgttttgtttttgagcaaaagagatcggtagtgttgtgtgtaggccattcttctggagagccacaagcaggaagagcagcgctgtgttgcagaatggagtttccatggatttctaccagaccactgaaggagttcctggaagccctgcggtagctagcactgaagactatttttctattggtataacccgcccacctgaaggggaaagggaaatcaaattaatttttctcgttagacataaggaaatttaaggaaaaacagctttaagaacagttactcagcgtagatgtgtgttcacacaaattgctctgcattcagtgttcattgngaattgg

SEQ ID NO: 224 - DNA, 397 bp, Homo sapiens
agacaagtatgttgagagttgctggtgtaaaatacgtttgaaatagttgatctacaaaggccatgggaaaaattcagagagttaggaaggaaaaaccaatagctttaaaacctgtgtgccattttaagagttacttaatgtttggtaacttttatgccttcactttacaaattcaagccttagataaaagaaccgagcaattttctgctaaaaagtccttgatttagcactatttacatacaggccatactttacaaagtatttgctgaatggggaccttttgagttgaatttattttattatttttattttgtttaatgtctggtgctttctatcacctcttctaatcttttaatgtatttgtttgcaattttggggtaagactttttttatgagt

SEQ ID NO: 225 - DNA, 478 bp, Homo sapiens
acacagtttcagaaaaaacaaggaaagagtactattgatgtctggtggctttttgatgatggaggtttgaccttattgataccttaccttctgacgaccaagaaaaaatggaaagactgtaagatcagagtattcattggtggaaagataaacagaatagaccatgaccggagagcgatggctactttgcttagcaagttccggatagacttttctgatatcatggttctaggagatatcaataccaaaccaaagaaagaaaatattatagcttttgaggaaatcattgagccatacagacttcatgaagatgataaagagcaagatattgcagataaaatgaaagaagatgaaccatggcgaataacagataatgagcttgaactttataagaccaagacataccggcagatcaggttaaatgagttattaaaggaacattcaagcacagctaatattattgtcatgagtctcccag

SEQ ID NO: 226 - DNA, 473 bp, Homo sapiens
ctcagcctctgggatggattactggattgttaaaaacagctggggcaccggctggggtgagaatggctacttccggatccgcagaggaactgatgagtgtgcaattgagagcatagcagtggcagccacaccaattcctaaattgtagggtatgccttccagtatttcataatgatctgcatcagttgtaaaggggaattggtatattcacagactgtagactttcagcagcaatctcagaagcttacaaatagatttccatgaagatatttgtcttcagaattaaaactgcccttaattttaatatacctttcaatcggccactggccatttttttctaagtattcaattaagtgggaattttctggaagatggtcagctatgaagtaatagagtttgcttaatcatttgtaattcaaacatgctatattttttaaaatcaatgtgaaaacatagacttatttttaaattgt

SEQ ID NO: 227 - DNA, 457 bp, Homo sapiens
  misc_feature 368, 454: n = A,T,C or G
acacttttttttaaaacagctttattgtttttaaagcctacaatttgataagccttgacatatgtatacctgtgaaagcatcaccacaatcaagacactggacatatctatcactcccccatctcagatatcccccctaatcctggataccatttgttgaaagatgttattactctagctgaacttacaagagactttagaccagggatctaaattacagtggccttagtgaccttgtccttatcttcttaggacagctgagaagccactgggacttagagcctttaaaaggagattaactgtcccaaaaggatctttgctactgaccagcagacacttcttccttcagtagcctttcatactgtgtngagtaacaccctagggtgtccattaaagttttgagttttacctagagcccagagccatgaatcaggattctgtctacatgattcgngtt

SEQ ID NO: 228 - DNA, 499 bp, Homo sapiens
ggaaggggctattgcctcctcccagccacgttccctttcctcctctccctcctgtggattctcccatcagccatctggttctcctcttaaggccagttgaagatggtcccttacagcttcccaagttaggttagtgatgtgaaatgctcctgtccctggccctacctccttccctgtccccacccctgcataaggcagttgttggttttcttccccaattcttttccaagtaggttttgtttaccctactccccaaatccctgagccagaagtggggtgcttatactcccaaaccttgagtgtccagccttcccctgttgtttttagtctcttgtgctgtgcctagtggcacctgggctggggaggacactgccccgtctaggtttttataaatgtcttactcaagttcaaacctccagcctgtgaatcaactgtgtctcttttttgacttggtaagcaagtattaggctttggggtggggggaggtctgtaatgtgaa

SEQ ID NO: 229 - DNA, 541 bp, Homo sapiens
ctacggtcattgatgagatccgaaatggcccataccgacagctcttccacccagagcagctcatcactgggaaagaggatgctgccaacaactatgcccgtggtcactataccattggcaaggagatcattgacccagtgctggatcggatccgcaagctgtctgaccagtgcacaggacttcagggcttcctggtgttccacagctttggtgggggcactggctctggcttcacctcactcctgatggagcggctctctgttgactatggcaagaaatccaagctggaattctccatctacccagccccccaggtgtctacagccgtggtcgagccctacaactctatcctgaccacccacaccaccctggagcactcagactgtgccttcatggtggacaacgaagcaatctatgacatctgccgccgcaacctaacatcgagcgcccaacctacaccaacctcaatcgcctcattagccaaattgtctcctccatcacagcttctctgcgctttgacggggccctcaatgtggacctg

SEQ ID NO: 230 - DNA, 77 bp, Homo sapiens
  misc_feature 8: n = A,T,C or G
gcattganccagtggtgctaaatgctacatactccaactgaaatgttaaggaagaagatagatccaatttaaaaaaa

SEQ ID NO: 231 - DNA, 478 bp, Homo sapiens
actgaagagctattacaatccaaatattgccgtttcataaatgtaataagtaatactaattcacagagtattgtaaatggtggatgacaaaagaaaatctgctctgtggaaagaaagaactgtctctaccagggtcaagagcatgaacgcatcaatagaaagaactcggggaaacatcccatcaacaggactacacacttgtatatacattcttgagaacactgcaatgtgaaaatcacgtttgctatttataaacttgtccttagattaatgtgtctggacagattgtgggagtaagtgattcttctaagaattagatacttgtcactgcctatacctgcagctgaactgaatggtacctgcccgggcggccaagggcgaattctgcagatatccatcacactggcggccgctcgagcatgcatctagagggcccaattcgccctatagtgagtcgtattacaattcactggccgtc

SEQ ID NO: 232 - DNA, 483 bp, Homo sapiens
ctttcttccagttgatcgaatcagctactgaggcttgtgcattcgtcacatagttctcatgccttggttttcagctccatcaggtcctttaaggacttctctgcattgattattctagttagccattcatctaattttttttcaaggtttttaacttctttgccatgggttcaaacttcctcctttagctcagagtagtttgattgtctgaagccttcttctctcaactcgtcaaagtcattctccatccagctttgttccgttactggtgaggagccgcgttcctctagaggaggagaggcgctctgattttgagagtttccagtttttctgctctgtttttttccccatctttgtggttttatctacctttggtctttgatgatggtgacgtacctgcccgggcggctgaagggcgaattctgcagatatccatcacactggcggccgctcgagcatgcatctagagggcccaattcgccc

SEQ ID NO: 233 - DNA, 113 bp, Homo sapiens
acagagtatacattttaaaatccacaatgcaagagcgtgggttaccaggtctcagaaaacaaaagaaggggttagatacgccaaagaaaacaactagagaatctcaacatgtt

SEQ ID NO: 234 - DNA, 370 bp, Homo sapiens
  misc_feature 320, 339: n = A,T,C or G
actgactgggacttcatattctaatggatgtggcaaaagaattgcaataagaagcagtgaacatttggaaccccaaaagaaaattacaggtattgcactgggtggggaaaggatagtgtgtctttaactcttaaattgtttggtcctattttttaaaaaggaaagggccctaagtagctcagatattaaagtagtattctcaattaccaaatgtttcatttgaaacaatttatcttaatgaaatatagaccaattctctgatctcgagttgtttttgtttggatacagcccttttttttttcttttttttcttccccttncctttcttcaccttggttntttggccaggaatacgtaaattcaaacttgt

SEQ ID NO: 235 - DNA, 593 bp, Homo sapiens
acactgaggaaagagattaacaattttctccacatcaagatgcttgttttgaaggattgattccatctctctgaatagttctttctccagtttcctcatgttgttcaacattattttggctttttcctaaacaattaaaaatataaagataaacacatatacatatacacataaatctaaccaaattcaacccatctctacaaataaggtttgttcatgctggcttctgattgtggtttggttcccttcttgttctttagagacagaaagaatgaaatgaaattctttgggaaaatcattgctctagattgagttaatgcatgaataccaaattatttttagtagaaaagacaaaaacaattataagagtagtttataagtaaaaaacctaaaagacaacaggacaatagaaaatctcatatgaactgtgtatgtggaaggttgctgaaaactgaggctgaaatatttttatcaattttgatcttttacatttaaaaccaatattatcagattaatacaatagaacaataatgttcaggaaaaaatcaaccaaaagaagacatttcctctatgacctcatccttattcaataa

SEQ ID NO: 236 - DNA, 474 bp, Homo sapiens
  misc_feature 23, 62: n = A,T,C or G
acgaggctaccccacgttattgnttttccgaggagggaagaaagtcagtgagcacagtggangcagagaccttgactcgttacaccgctttgtcctgagccaagcgaaagacgaactttaggaacacagttggaggtcacctctcctgcccagctcccgcaccctgcgtttaggagttcagtcccacagaggccactgggttcccagtggtggctgttcagaaagcagaacatactaagcgtgaggtatcttctttgtgtgtgtgttttccaagccaacacactctacagattctttattaagttaagtttctctaagtaaatgtgtaactcatggtcactgtgtaaacattttcagtggcgatatatcccctttgaccttctcttgatgaaatttacatggtttcctttgagactaaaatagcgttgagggaaatgaaattgctggactatttgtggctcctgagttgagtga

SEQ ID NO: 237 - DNA, 612 bp, Homo sapiens
  misc_feature 1, 9, 42, 44: n = A,T,C or G
nccagctantagttatcctactaagagaaaaggcaacatggnantttcacatttcacatgaaagactagcattaactgggcctggcgtgcgggcttaactttgacataacactagcgattattttagacccaggaaaaaatgatttcataccagtcttttcttcacataagatttgtgtagcattaaaattatgggttactgaataagccatgaaggcaaaaatgtggaactctcctttgccaaaacagaaacaaacatccctgttttgactcctgtccagtttccaaaacaaaacaacaaaacatacatacacctttgttattgcacatctttcacacaaacttgtgtatgtataatatacatatatatttttaaatatgctacacataaaaaaagactatggcactttacagaatatatgtttaacaaagatcattacaccacagatgtttgaaaactatacaaaaacccttatacaattaatgcaacattgtttgaattattagcacacaggtttaaagaatccacagaatccaaggcaaatatttctgcctcagagttcattgagaagcgcagcccatcccatcccgtcatgagactttctttaagcc

SEQ ID NO: 238 - DNA, 554 bp, Homo sapiens
acaggtaaaagccagacttggcagggacccctctttctaggctgaaccttgggtccccctgctttttggcagacctaatggatcactgtcttgcagctagttcttcatgtggggcctcttaggccagtgccggaggaggcatgctcctctttctatgccacagaacaaacactactctagcagagcctttcttgcactttaaagtgagattagtttagctgtaatttggttaaaaacttcctaagagagaaaattaagtctactgatttggtataggtaaatggacattaaacttttctaaagtaaaggagatggtagataccgttagattatagtcttgaggttcatgtgaagccagtggtgttaacttactttgatttccttgttcaggtcagggcctggaacgcctgtgcggggaggtcactcaattcaaaattttctgtatgaaagcatttttcaccaaaatgagcctcatccctttatgcaacacataaccttactgagggagggaaatacggaagccacctttttatttctcttcactgtgtacctcg

SEQ ID NO: 239 - DNA, 522 bp, Homo sapiens
gaacaaaccaaaatatttaactatcagaactaaaaatgagaaaatccaaatagttctatagtaacaataaattatgaacaagtttccgtcaccaaatatcactctgaccaaaaatgactgtcttttgtcataaaagctacagcttaagctgattccaagatttctataaaaatgagagtgaagaaatttcttctttcaaaatactcattatgccaccaggttcaatgtaagtattttgtatataacaaagtagcagtcaggatatttgttgatggatggctactccccaagaaatgacacattcttacaaactttaaaaaaatagcaaagttggttacaaaattctatttggggagcagggaaaaaacttgttccatgtcaattagaatatcaaagcatttcaaaatcaaactgcttccaaagccaatcatcacacaacagtaatatactgtatgggccattccactgtatcttgttatatgttgatcatacagtgtaactaaggggttgaacaagtcagta

SEQ ID NO: 240 - DNA, 449 bp, Homo sapiens
caggtacaattcgtatttgctttcctctttcctttcttcagacaaacaccaaataaaatgcaggtgaaagagatgaaccacggctagaggctgacttagaaatttatgctgactcgatctaaaaaaaattatgttggttaatgttaatctatctaaaatagagcattttgggaatgcttttcaaagaaggtcaagtaacagtcatacagctagaaaagtccctgaaaaaaagaattgttaagaagtataataaccttttcaaaacccacaatgcagcttagttttcctttatttatttgtggtcatgaagactatccccatttctccataaaatcctccctccatactgctgcattatggcacaaaagactctaagtgccaccaggcagaaggaccagagtttctgattataaacaatgatgctgggtaatgtttaaatgagaacattg

SEQ ID NO: 241 - DNA, 426 bp, Homo sapiens
gccaaaaattttagagtttgagaaggtcacagaaatcctctagttggtgcctccacagtcttcattttacagaggaactcagggctaatggagttaatgcaactagatcagggttttgggtctgtgttctttctaccgtcagcacctgtgtggtcaattctggacacttcccagagaagtctttgagtagagaatcctactcaaatttcactgtatattttaagcattcctctcctttccctttgcctcccctgttgccttttcttcccctgatttctcctctggtcatctcctctcccttctgcgtgtaagccatgggaaagggatgagggaggacagcttctggttaaacacaggtccctcttccacatcaaatgaacattggcttcctgggacagaaggccttcaaaggagggattgcaaagc

SEQ ID NO: 242 - DNA, 430 bp, Homo sapiens
  misc_feature 44: n = A,T,C or G
actaagttttgtcaatattgtggtttcctgattgtattgttggntttctctctgagcattgaggtatactagaagtagagcttctcaaacataatatcattacctcataagcattaacaaatcaggcccaaagagcgtaagtcctagaaatttgttttaaagcagccctagtcatggtgctggtgctaccgccttgttttaggagcctgcctcctgtcagtatgaaaccctcacctgaaaaatgccagcctggacaccaaacactgagccccttcaacaggcacattatttccccctgagatccataagggaatttagtttctactattgtagagttctgaaaagaggtaaaatagtagtcctttggtcatcctatttttgctttcaattttgatatttcagactgtaaaaggccttgggggatgatagt

SEQ ID NO: 243 - DNA, 510 bp, Homo sapiens
  misc_feature 1: n = A,T,C or G
ncaggtactaaaaaccacttgttaacagctgacatgcactcacaagctgtgtttccgctgtgaggaggccaatggcaggcgcaggagtggcggctgcaggacggctgcccggggactcaccaggctgtggtcctgctctaaccccccacgccccattccctcccaaccgcaggctcattcttgctccttttgaacgacttcctctctaggcctggcacccccgaagatagcagagttgggattggctacttgattgaggggcgtcgcgactgttcgaggtttaagctggagtcgtggtctctgtgctctttcctcttctgtgggttctctgaaatccatgttggatccacggaggggagggccatctctgaagcggctgcccatgggggggcctgttcgccggtcgcctgggcgactacctcccctgccccctaagaagtcatccctgaagcctctgtcatctggtccaccttttctgaatccaaagccacctttatcttgttttctgcc

SEQ ID NO: 244 - DNA, 316 bp, Homo sapiens
acaaaaatgtgttctgcttttatctgatataaattgcatgtaataccatgatttaaacaatatcagttatattaactaatgccatgagatatatcttactcagaacgtctgatgtttcccataatagacagaaaaaatgcagttgtatgagcaactgagtttcttttcatcttcaaattcatttgtgatggtggggagatctaaggacaatccttccattgaagaagtaggaaaaacagttacagcactgttctgaactcatcaaaaatgaaattaggcacatgtgcttcagcaaccctcctgggtagctttgtgt

SEQ ID NO: 245 - DNA, 106 bp, Homo sapiens
  misc_feature 20, 50, 69, 103, 104, 106: n = A,T,C or G
tctccctaagacactgttcncatcacagtagccattttaagccaatcttntttttacacacggggagantctggagagaacatttttttcaggacgaaaatgnntn

SEQ ID NO: 246 - DNA, 76 bp, Homo sapiens
  misc_feature 46, 52, 55: n = A,T,C or G
gttttaaaaatattggacatcttcaatcttaaacatttctatttanctgatnggntctcacatatacttctaaaag

SEQ ID NO: 247 - DNA, 446 bp, Homo sapiens
cagaaatgctaaaattataagacaaagacttcaaaatagctattttaattttgcctagtgaggtaaatgcaaacatgctcactatgaatgaaaacaggtaatctcagcagtcatgtaaactataaaaataagcaaatataaattttagaattaaaacacaatatctaaaaataaattcacctgatattctcaatagaaaaaatggtaatgcagagaaaaatgtatgaaaatatggcaatttgaagaagagagaagagatcaataaaataaataagtatatccttggagacctgtggatgttttttgaaaagtgaatcatgtaagtaattgaagtcccagaagaaaagaaaagaagaggatgagcagaaaaaaatttctgaaaaaatatctgaaagcttaaacactataatgaaagacacacatttacaaactcaagaagtttagta

SEQ ID NO: 248 - DNA, 470 bp, Homo sapiens
actttctccttgcttcactggccacagcatctccctccagccctcgctatgtgcctctgccatcttcacccatcatggagcagaggtgaggagaggcagcctgggaatatggagaccagtgaaggaccaggcctggagagcacagggtcctacctgggcatccagcagaggagcccctaaaggccaggagcaccccaagaggagggagggcagccagcctccattgacggcgagcctccagccctctcctactttgatcaccatttctctccaggctttctgcctccgagatgtggcaccatagtgcggtgccctgtggcttcaccgccctacttccacctccgcccagcctgtaatgtttatataagcagcctcaaggaccaagaaccatctgcgaaaggacacacacaggaaattcataaaagaaatctgaatggataaaaccatgaaaaaaagtatgcttcattagt

SEQ ID NO: 249 - DNA, 111 bp, Homo sapiens
accattaaatcacctaaaacaaataatctaaaaaaatactagtttaaattaaaaccctgaggaattaaaatttgttttacacaatagttttggttaagtgcaatttcatgt

SEQ ID NO: 250 - DNA, 536 bp, Homo sapiens; identical to SEQ ID NO: 172

SEQ ID NO: 251 - DNA, 603 bp, Homo sapiens
  misc_feature 281: n = A,T,C or G
ttttttttgccatgacaaaagcgtgcatttaatttgatgctttgcagagatacatgaccaaagttgtatgcatggcttgtcttttgggatggtcccagctgtttattttaaaagaaaaaattaaaatagagccaacaaatgcaattaagaaaaaaaagtattgagacacaaggggacctacatgttctggtctaagaagcatgcaagtattacaaagcattccagatacagtatgacagaggaacagtgaacaagcattggaacgatgctctttctttcanaaacgggaagtctaacagttatgttttcacaatggtagtgattaaaccatctttatttttaaggaattttataggaagaattttagcaccatcattaaaggaaaaataataatacctttttagccctgcctatctccagtcttggaataataacagaagcatagcacctttcagtatctaaaatataaacaagaatagtaagtcatcccagcttctagagatgaggtagctcatgctaagaaatgttgggtcatttttcctatgaaagttcaaaggccaaatggtctaattccaatcatcacatttgattagagtcagctcc

SEQ ID NO: 252 - DNA, 372 bp, Homo sapiens
actctgctatggtgctggcttcctttaaactcaggatagatgccaggtgggctccgtttccgtaagactgacactcgagctcggcatcagaccagttcctcagcttcctgaagtaaccatagcaattggacttgtggtaaaaccatccaggagcacagctgggtctcatgatgatatcacccaggactcctgttttggccaggcagctcagcaataggagcagccgcatgcttctggaagccatcttcctcctaccctgaggatgtagctagtgcaaggatctcagagaccttactagcgcttctttgaaactcctgggttctccttgatctgcaaatctgtttggcaaccaagactctaagggcccctgcc

SEQ ID NO: 253 - DNA, 490 bp, Homo sapiens
actataccaacacagactttatagtatgtttaaaaatcccaactgcaagatacacaggatgctgtaggcctgatttcctgttgtagaacctccagccctgtgttgaatgaggaggtgcaaatatatagacccttaagatcagaccacagcaggcattcaggtggaggggatgaactccattcattccagctgtgcagtgggacatctgcgccctccgcatctcggctcattcctcatctgagccactcaagagggcggtctggtaagtgtcatctgaattcagcttctgaattccaatgatttctccccttccgtgtctcttcatccgagtcaaaaggcagtaaacaagagaatagttgacggccacaatgctgagggcagccaggtagtgccagcagaagcacatggtgatgaacatgaggttggcatcatccttctggtcccattcgggtgttccaaaaggtgggaacagcacaaacccaatctgcca

SEQ ID NO: 254 - DNA, 323 bp, Homo sapiens
  misc_feature 18, 42, 46, 74, 77, 91, 119, 158, 172, 180, 192, 219, 229,238, 278, 290, 302, 305, 318: n = A,T,C or G
taaatttgcctcctatgngaagtcaggaaaatcatagctttncttntagttgaggggatgtagttggaaaacanaancaataaatatgtcncaagcttcaatttttgtaatgccccttntatttcctgcatagcaataagcctgttaatacattaaangtttttgctttctntttaaaangccaattatttncatctgtttcaaaaataaatttggaangggacattgngctgtttcnccttcaatgctgttaaaaattttaggaaaaaaaatgtcanaaggcctatctncaattttaactnctncttaagcaaattnctcat

SEQ ID NO: 255 - DNA, 472 bp, Homo sapiens
  misc_feature 80, 223: n = A,T,C or G
cataggtagctttatttggtttttagaaaaatatatacaataatcggaacatcagttcttaaatagttttaagttaaaanaatgcaagtgagaggatgtttccacagtcagatcaatactgcttaataaagtagataggaatttctgcaacaagtcaaaacatttacaggaatggtaagaactctgcaagagcagcttgtggctggcaagtcagccagctcanaaaacaggtaggaagggaaggggtttgatctttcccctttagtttgaatttgagaaagtgataaaagatttacatattcacctatcctaaaggctagagctttgagtaaaaacattagaatacagggatggaggccctctagggcatatgctaacaagctaacttatatcaaacaaaaatttgccatctcaatttggtattcagttggatttggatatattaggattacctgtcagtcacagttcaact

SEQ ID NO: 256 - DNA, 366 bp, Homo sapiens
  misc_feature 139, 170, 224, 253, 301, 326, 336, 363: n = A,T,C or G
cggatgcaaacagcaaaaggctttattgggaacacgggtacccgggcgactcagtctatcggatgactggcgcgccgagtgtggggtttttaccctttttatagggctggggagcaaaaagcgcggttacagaagcganaagcgagctgattggttagtttaaataaggnttggggtttttcccggtcttttggggaacttgaaactgaggtgggactttccanaaactgttgctagtttcgctttatctgantaccatctgttcttggccctgagccggggcccaggtgctcgaccacanatatcctgtttggcccctgtcccanttttgttcanccttattctttaactaaacttccttgngac

SEQ ID NO: 257 - DNA, 479 bp, Homo sapiens
  misc_feature 360, 379, 403, 435: n = A,T,C or G
ttaccaagaagtgttttatttttcttgcagtagctttgttaattgcacaaaatcatgttttgtttttgccatttaaacattatcacacaatcctattctgaaagacaaatgttcattaaaaacaaagcaaaaataaaaattcacaaccttaattacctagatttgtcatttaaaggtttaaagaaaaaagggaggggctttcttacaagctttttcacaagtgtcacattttctccttaaaagggaaggatttcaaaagaaaggtgaaatagcttaaacagaaatattcataaaaaggaactttacagaattgtcaacaatattaagacaaaattgactaaccggtttcattaccgcatnttcccccgcccccccccantgtgttccgccaggactaaaacangctttgtgttcaaacagaaatgcttcaaaatnccaatgaaatgaactgtgcttaaaaccccgacagggatttttcc

SEQ ID NO: 258 - DNA, 501 bp, Homo sapiens
gactcacacaaggcaggtgggtgaggaaatccagagttgccatggagaaaattccagtgtcagcattcttgctccttgtggccctctcctacactctggccagagataccacagtcaaacctggagccaaaaaggacacaaaggactctcgacccaaactgccccagaccctctccagaggttggggtgaccaactcatctggactcagacatatgaagaagctctatataaatccaagacaagcaacaaacccttgatgattattcatcacttggatgagtgcccacacagtcaagctttaaagaaagtgtttgctgaaaataaagaaatccagaaattggcagagcagtttgtcctcctcaatctggtttatgaaacaactgacaaacacctttctcctgatggccagtatgtccccaggattatgtttgttgacccatctctgacagttagagcccatatcactggaagatattcaaatcgtctctatgcttacgaac

SEQ ID NO: 259 - DNA, 365 bp, Homo sapiens
cgcatttggccgcctccctaccgctccaagcccagccctcagccatggcatgccccctggatcaggccattggcctcctcgtggccatcttccacaagtactccggcagggagggtgacaagcacaccctgagcaagaaggagctgaaggagctgatccagaaggagctcaccattggctcgaagctgcaggatgctgaaattgcaaggctgatggaagacttggaccggaacaaggaccaggaggtgaacttccaggagtatgtcaccttcctgggggccttggctttgatctacaatgaagccctcaagggctgaaaataaatagggaagatggagacaccctctgggggtcctctctgagtc

SEQ ID NO: 260 - DNA, 466 bp, Homo sapiens
  misc_feature 452, 454: n = A,T,C or G
cagccatgagtatgctcaggcttcagaagaggctcgcctctagtgtcctccgctgtggcaagaagaaggtctggttagaccccaatgagaccaatgaaatcgccaatgccaactcccgtcagcagatccggaagctcatcaaagatgggctgatcatccgcaagcctgtgacggtccattcccgggctcgatgccggaaaaacaccttggcccgccggaagggcaggcacatgggcataggtaagcggaagggtacagccaatgcccgaatgccagagaaggtcacatggatgaggagaatgaggattttgcgccggctgctcagaagataccgtgaatctaagaagatcgatcgccacatgtatcacagcctgtacctgaaggtgaaggggaatgtgttcaaaaacaagcggattctcatggaacacatccacaagctgaaggcagacaangnccgcaagaagct

SEQ ID NO: 261 - DNA, 501 bp, Homo sapiens
  misc_feature 416: n = A,T,C or G
cgaggcagggcgggcgggcgctctaagggttctgctctgactccaggttgggacagcgtcttcgctgctgctggatagtcgtgttttcggggatcgaggatactcaccagaaaccgaaaatgccgaaaccaatcaatgtccgagttaccaccatggatgcagagctggagtttgcaatccagccaaatacaactggaaaacagctttttgatcaggtggtaaagactatcggcctccgggaagtgtggtactttggcctccactatgtggataataaaggatttcctacctggctgaagctggataagaaggtgtctgcccaggaggtcaggaaggagaatcccctccagttcaagttccgggccaagttctaccctgaagatgtggctgaggagctcatccaggacatcacccanaaacttttcttcctccaagtgaaggaaggaatccttagcgatgagatctactgcccccctgagactgccgtgctcttggggtcct

SEQ ID NO: 262 - DNA, 461 bp, Homo sapiens
  misc_feature 442: n = A,T,C or G
ccttctcgcttcatttcattcatttcatcttccattgctgataccctttcttccagttgatcgcattggctcctgaggcttctgcattcttcacgtagttctcgagccttggttttcagctccatcagctcctttaagcacttctctgttttgattattctagttatacattcttctaaatttttttcaaagttttcaacttctttgcctttggtttgaatgtcttcccatagctcagagtaatttgatcgtctgaagccttcttctctcagctcgtcaaagtcattctccgtccagctttgttccgttgctggtgaggagctgcgtttctttggaggaggagaggcactctgctttttagagtttccaagtttttctgttctgttttttccccatctttgggggtttatctacttttggctttgatgatggggatgtacanaagggtttttggggggaga

SEQ ID NO: 263 - DNA, 601 bp, Homo sapiens
ggtggtggtgactgagcggagcccggtgacaggatggctgggcacagattggtgttggtattaggagatctgcacatcccacaccggtgcaacagtttgccagctaaattcaaaaaactcctggtgccaggaaaaattcagcacattctctgcacaggaaacctttgcaccaaagagagttatgactatctcaagactctggctggtgatgttcatattgtgagaggagacttcgatgagaatctgaattatccagaacagaaagttgtgactgttggacagttcaaaattggtctgatccatggacatcaagttattccatggggagatatggccagcttagccctgttgcagaggcaatttgatgtggacattcttatctcgggacacacacacaaatttgaagcatttgagcatgaaaataaattctacattaatccaggttctgccactggggcatataatgccttggaaacaaacattattccatcatttgtgttgatggatatccaggcttctacagtggtcacctatgtgtatcagctaatttggagatgatggtgaaagtagaaccaaatcgaatacaaaaaaccttaaagcc

SEQ ID NO: 264 - DNA, 381 bp, Homo sapiens
  misc_feature 102, 239, 249, 261, 264, 279, 308, 312, 353, 364, 375: n = A,T,C or G
cagtcccaggtcctgtgatgtttattgaaggaagcaagggcagggctggggtgccgccctcaggcctggatgtggctcttcgcactgaaggccaagtagtanatcacaaggccgatcgccgcagccagcacctcagtggacacccagggcccgttccaagtgccccgatggtccacgctgactgtaaacagaggcgggatgatggaaatgtcctcgttattcctctgagccttcctgangaggctgtangactcctcgtcnaanaatctaacctcatangtgcctgcgtgggcgctcttgtggtccangctncaagacacctgataacgcccccatcctggcctcaatgacanggaattgtttncaccacgtcancataaa

SEQ ID NO: 265 - DNA, 571 bp, Homo sapiens
  misc_feature 138, 211, 223, 300, 372, 499, 535, 557, 565: n = A,T,C or G
ggatgcaaacagcaaaaggctttattgggaacacgggtacccgggcgactcagtctatcggatgactggcgcgccgagtgtggggtttttaccctttttatagggctggggagcaaaaagcgcggttacagaagcganaagcgagctgattggttagtttaaataaggcttggggtttttcccggtcttttggggaacttgaaactgaggngggactttccanaaactgttgctagtttcgctttatctgagtaccatctgttcttggccctgagccggggcccaggtgctcgaccacanatatcctgtttggcccctgtcccagttttgttcagccttattctttaactaaacttccttgtgacttttganaactcagctctggtactttttcatgccttgcaaaatggcgttactgcagctagcttgctaagccttatggtggggtctttcattcccccctctttctggaaactgaataaaatcttttattcacgcnattctacttcttctggatctattgatttgaattggngatactgttgggtcaaaaccanggcctgcnccaccg

SEQ ID NO: 266 - DNA, 501 bp, Homo sapiens
gacacatctggctttttgttagaggtcttcatggaaagagtggtacatggtgggatgagcatctttctgaagaaaatgtcccattcattaagcagttggtctctgatgaagataaagcccaattagcaagtaaactgtgtcctctgaaagatgaaccatggcctatacatccttgggaaccaggttcctttagagttggtcttattgccttgaagctgggcatgatgcctttatggaccaaggatggtcaaaagcatgtggtcacattacttcaggtacaagactgtcatgtcttaaaatatacgtcaaaggaaaactgtaatggaaaaatggcaaccctgtctgtaggaggaaaaactgtatcacgttttcgtaaagctacatccatattggaattttaccgggaacttggattgccgccgaaacagacagttaaaatctttaatataacagataatgctgcaattaaaccaggcactcctctttatgctgctcactttc

SEQ ID NO: 267 - DNA, 501 bp, Homo sapiens
  misc_feature 461: n = A,T,C or G
ggccgccatcatgggtcgcatgcatgctcccgggaagggcctgtcccagtcggctttaccctatcgacgcagcgtccccacttggttgaagttgacatctgacgacgtgaaggagcagatttacaaactggccaagaagggccttactccttcacagatcggtgtaatcctgagagattcacatggtgttgcacaagtacgttttgtgacaggcaataaaattttaagaattcttaagtctaagggacttgctcctgatcttcctgaagatctctaccatttaattaagaaagcagttgctgttcgaaagcatcttgagaggaacagaaaggataaggatgctaaattccgtctgattctaatagagagccggattcaccgtttggctcgatattataagaccaagcgagtcctccctcccaattggaaatatgaatcatctacagcctctgccctggcgnataaatttgtctgtgtctcaagcaataaaatgattgttta

SEQ ID NO: 268 - DNA, 421 bp, Homo sapiens
  misc_feature 332: n = A,T,C or G
ttgcagacaccattctaaacactttattatgttaagtcccataatccttatgacaaccccatgaaggtgataccatcatcatctccattgtacagatgacaaaacaaaggcacagaatatttagatagcttgctcaaggtcacacagctgcagtggcagagcaaggattcaaagtctggttccagagtccatgctcttaaacgctcagctagaacaccttgggttgcgctcgacgaggaaatgcaactttggggtcaatcgtcttggaatctaactcatggtggggctgacctaatactttatctacacttgctgggtctgcgaacgtgacnaaaccgaagcctctggagccgtttcgtagtgggatctctcatgaccatacattctctaatttctccaatttgctaaaatagctctaagg

SEQ ID NO: 269 - DNA, 441 bp, Homo sapiens
cgaggagactacacaccgagcgagcgcctgggcccgaagggagcgatgctgtggttccagggcgccattccggccgccatcgcgacggccaaaaggagcggcgcggtcttcgtggtgttcgtggcaggtgatgatgaacagtctacacagatggctgcaagttgggaagatgataaagttacagaagcatcttcaaacagttttgttgctattaaaatcgataccaaaagtgaagcctgcctacagttttcacaaatctatcctgtagtgtgtgttccatccagtttctttattggagacagtggaattcccttggaagtaatagcaggaagtgtttctgcagatgaacttgttacaagaattcacaaggtccgacagatgcatttgctaaaaagtgaaacatcagtagcaaatggcagtcagtcagaaagttcagtgtct

SEQ ID NO: 270 - DNA, 372 bp, Homo sapiens
  misc_feature 360: n = A,T,C or G
agggtgcggtcggggaataaggcagctgttgtgctgtgtatggacgtgggctttaccatgagtaactccattcctggtatagaatccccatttgaacaagcaaagaaggtgataaccatgtttgtacagcgacaggtgtttgctgagaacaaggatgagattgctttagtcctgtttggtacagatggcactgacaatcccctttctggtggggatcagtatcagaacatcacagtgcacagacatctgatgctaccagattttgatttgctggaggacatttgaaagcaaaatccaaccaggttctcaacaggctgactttctggatgcactaatcgtgagcatggatgtgattcaacntggaacaatagg

SEQ ID NO: 271 - DNA, 372 bp, Homo sapiens
  misc_feature 202, 207, 322, 357: n = A,T,C or G
gaggactgaatggaagaaaaggacttttaaccaccattttgtgacttacagaaaggaatttgaataaagaaaactatgatacttcaggcccatcttcactccctgtgtcttcttatgctttatttggcaactggatatggccaagaggggaagtttagtggacccctgaaacccatgacattttctatttatgaaggccaanaaccnagtcaaattatattccagtttaaggccaatcctcctgctgtgacttttgaactaactggggagacagacaacatatttgtgatagaacgggagggacttctgtattacaacaganccttgtacagggaaacaagatctactcacaatctncaggttgcagccctg

SEQ ID NO: 272 - DNA, 601 bp, Homo sapiens
tccaaggtcccactcctgcagctcttctcacaggaccagccactagcgcagcctcgagcgatggcctatgtccccgcaccgggctaccagcccacctacaacccgacgctgccttactaccagcccatcccgggcgggctcaacgtgggaatgtctgtttacatccaaggagtggccagcgagcacatgaagcggttcttcgtgaactttgtggttgggcaggatccgggctcagacgtcgccttccacttcaatccgcggtttgacggctgggacaaggtggtcttcaacacgttgcagggcgggaagtggggcagcgaggagaggaagaggagcatgcccttcaaaaagggtgccgcctttgagctggtcttcatagtcctggctgagcactacaaggtggtggtaaatggaaatcccttctatgagtacgggcaccggcttcccctacagatggtcacccacctgcaagtggatggggatctgcaacttcaatcaatcaacttcatcggaggccagcccctccggccccagggacccccgatgatgccaccttaccctggtcccggacattgccatcaacagctgaacagccttgccc

SEQ ID NO: 273 - DNA, 375 bp, Homo sapiens
cgaggctggactcccaaccccgccggcgaaaccatgagctccgtccagcagcagccgccgccgccgcggagggtcaccaacgtggggtctctgttgctcaccccgcaggagaacgagtccctcttcactttcctcggcaagaaatgtgtgactatgtcttcagcagtggtgcagttatatgcagcagatcggaactgtatgtggtcaaagaagtgcagtggtgttgcttgtcttgttaaggacaatccacagagatcttattttttaagaatatttgacattaaggatgggaaactattgtgggaacaagagctatacaataactttgtatataatagtcctagaggatattttcatacctttgctggagatact

SEQ ID NO: 274 - DNA, 505 bp, Homo sapiens
ccagcagccgtccggagccagccaacgagcggaaaatggcagacaatttttcgctccatgatgcgttatctgggtctggaaacccaaaccctcaaggatggcctggcgcatgggggaaccagcctgctggggcagggggctacccaggggcttcctatcctggggcctaccccgggcaggcacccccaggggcttatcctggacaggcacctccaggcgcctaccctggagcacctggagcttatcccggagcacctgcacctggagtctacccagggccacccagcggccctggggcctacccatcttctggacagccaagtgccaccggagcctaccctgccactggcccctatggcgcccctgctgggccactgattgtgccttataacctgcctttgcctgggggagtggtgcctcgcatgctgataacaattctgggcacggtgaagcccaatgcaaacagaattgctttagatttccaaagagggaatgatgttgcctt

SEQ ID NO: 275 - DNA, 372 bp, Homo sapiens
cctaccactcccctggttatgtttatgaccagtttgagagaaaaaccaaatataaaagagagccggtgtcattaactctggccctgctgttgggaggacttactatgggcggcatagctgcaggagtaggaacagggactacagccctagtggccaccaaacaattcgagcagctccaggcagccatacatacagaccttggggccttagaaaaatcagtcagtgccctagaaaagtctctgacctcgttgtctgaggtggtcctacagaaccggagaggattagatctgctgttcctaaaagaaggaggattatgtgctgccctaaaagaagaatgctgtttctatgcagaccacactggcgtagtaaggg

SEQ ID NO: 276 - DNA, 375 bp, Homo sapiens
caaaaaggcagaagggtcccccaaccaaggcaaaaaggcagacgcagctgccaatcagggtaaaaagacagagtcagcttctgtccagggcagaaatacagatgtggcccagagcccagaggcaccaaagcaagaggctcctgccaagaagaagtctggttcaaagaaaaaaggtgagcctgggcccccagatgccgacggccctctctacctcccctacaagacgctggtctccacggttgggagcatggtgttcaacgagggcgaggcccagcggctcatcgagatcctgtctgagaaggctggcatcattcaggacacctggcacaaggccactcagaagggtgaccctgtggcgattctgaaacgccagct

SEQ ID NO: 277 - DNA, 495 bp, Homo sapiens
  misc_feature 341, 343: n = A,T,C or G
gattcagtcccttctccatgaaatggtacacgcagaacatgaaaccgagcatagttaccacgtggaagagacagtttcacaagactgtaatcaggatatggaagagatgatgtctgagcaggaaaatccagattccagtgaaccagtagtagaagatgaaagattgcaccatgatacagatgatgtaacataccaagtctatgaggaacaagcagtatatgaacctctagaaaatgaagggatagaaatcacagaagtaactgcttcccctgaggataatcctgtagaagattcacaggtaattgtagaagaagtaagcatttttcctgtggaagaacagnangaagtaccaccagatacttaaagcttcaaaaagactgcccctaccaccacaggaggaccagcctaaccatacgctccaaaagatggctgtgatagatcttgtgaagcaattactgagcagatcaagatctttgggaaggaacactaaagatg

SEQ ID NO: 278 - DNA, 611 bp, Homo sapiens
ggggcgctgagagcagcaaggccagagttgaaaacttacagagtcctgaggctttcagactgaaaaaggctttcttctgtcactgacaatcgccaccatgatccatagtcttttcttgatcaactcctctggagacattttcctggagaaacattggaaaagtgtggtcagccgttctgtttgtgattacttttttgaggcgcaagagagagctactgaggcagaaaatgtgcctccggttatccctacccctcaccactatctcttaagtgtttaccgccacaagatcttttttgtggccgtgatccagacggaggtcccccctctgtttgtcattgagtttcttcaccgagtggtggacacatttcaggattattttggagtctgttcagagccagtgatcaaagacaatgtagttgtggtttatgaggtattggaagagatgcttgacaatggttttccattggctaccgagtcgaacattcttaaagaactcataaagcctcctaccatccttcgaacggttgtcaacaccatcacaggaagcacgaatgtgggtgaccagcttcccactgggcagctgtcagtggtgccttggcgacggactgggg

SEQ ID NO: 279 - DNA, 611 bp, Homo sapiens
gcgtggatacacgccgctcacgtaaaggcggcgacaactcctccggccggagcagcatggaaggtccagcgttctcaaaaccccttaaagataagattaacccgtggggccccctaatagttatagggatcttggtgagggcaggagcctcggtacaacgtgacagccctcaccaggtcttcaatgtcacttggagagttaccaacctaatgacaggacaaacagctaacgctacctccctcctggggacgatgacagacaccttccctaaactatattttgacttgtgtgatttagttggagaccattgggatgacccagaacccgatattggagatggttgccgctctccggggggaagaaaaaggacaagactgtatgacttctatgtttgccccggtcatactgtaccaatagggtgtggagggccgggagagggctactgtggcaaatggggatgtgagaccactggacaggcatactggaagccatcatcattatgggacctaatttcccttaagcgaggaaacactcctaaggatcagggcccctgttatgattcctcggtctccagtggcgtccagggtgccacaccggggggtcgatgcaac

SEQ ID NO: 280 - DNA, 307 bp, Homo sapiens
gcgttcctacggacgcgtaggcaagttcgatgcgccggagtgaacagccagggtcccatctctcagccggctcccgggcggtgctagcagggaagagggacgcgccggcgaatgaaacactactagcccggaaagccgccctggaccttccacccgggcagcgagtctggcggcccctcgccgccgccccctccgaccagaacagactgcgctgcgagccccgggcttccgccgcagcgcgcagcaattggaggtgccagaggagaccagcagcagcacttgatttaactgggctgcgggaattccc

SEQ ID NO: 281 - DNA, 551 bp, Homo sapiens
ccacgaggcgttcatcgaggagggcacattccttttcacctcagagtcggtcggggaaggccacccagataagatttgtgaccaaatcagtgatgctgtccttgatgcccaccttcagcaggatcctgatgccaaagtagcttgtgaaactgttgctaaaactggaatgatccttcttgctggggaaattacatccagagctgctgttgactaccagaaagtggttcgtgaagctgttaaacacattggatatgatgattcttccaaaggttttgactacaagacttgtaacgtgctggtagccttggagcaacagtcaccagatattgctcaaggtgttcatcttgacagaaatgaagaagacattggtgctggagaccagggcttaatgtttggctatgccactgatgaaactgaggagtgtatgcctttaaccattgtcttggcacacaagctaaatgccaaactggcagaactacgccgtaatggcactttgccttggttacgccctgattctaaaactcaagttactgtgcagtatatgcaggatc

SEQ ID NO: 282 - DNA, 553 bp, Homo sapiens
gcatcctgagcggcagcgtggacgccatggtccaggctcacctgggggccgtgtttatgcctcacgggcttggccacttcctgggcattgacgtgcacgacgtgggaggctacccagagggcgtggagcgcatcgacgagcccggcctgcggagcctgcgcactgcacggcacctgcagccaggcatggtgctcaccgtggagccgggcatctacttcatcgaccacctcctggatgaggccctggcggacccggcccgcgcctccttctttaaccgcgaggtcctgcagcgctttcgcggttttggcggggtccgcatcgaggaggacgtcgtggtgactgacagcggcatagagctgctgacctgcgtgccccgcactgtggaagagattgaagcatgcatggcaggctgtgacaaggcctttacccccttctctggccccaagtagagccagccagaaatcccagcgcacctgggggcctggccttgcaacctctttccgtgatgggcagcctgctggtcagcactccagtagcgagagacggcacccaa

SEQ ID NO: 283 - DNA, 574 bp, Homo sapiens
  misc_feature 52, 116, 135, 198, 261, 285, 297, 425, 506, 526, 532, 573: n = A,T,C or G
cactggagcagcttctgcaggtcctacacagcaccacgccccactacattcnctgcatcaagcccaacagccagggccaggcgcagacctttctccaagaggaggtcctgagccanctggaggcctgtggcctcntggagaccatccatatcagtgctgctggcttccccatccgggtctctcaccgaaactttgtanaacgatacaagttactaagaaggcttcatccttgcacatcctctggccccgacagcccatatnctgccaaagggctccctgaatggngtccacacagcnaggaagccacgcttgaacctctcatccaggacattctccacactctgccggtcctaactcaggcagcagccataactggtgactcggctgaggccatgccagcccccatgcactgtggcaggaccaangtgttcatgactgactctatgctggagcttctggaatgtgggcgtgcccgggtgctggagcagtgtgcccgctgcatccanggtggctggaggcgacaccngcaccnaaagcaggagcggcagtggcgggcccgtcatgctcatccanc

SEQ ID NO: 284 - DNA, 611 bp, Homo sapiens
cacctggccaacgggcacgtggttcccatcaagccccaggtgaagggggtggtcagggaagagaacaaggtgcgtgctgtgcccacctgggccagtgtccaagttgtggatgaccctggctccttggcctcagtggagtccccggggacccccaaggagacgcccatcgagcgggagatccgtctggctcaggagcgtgaggcagacctgcgagagcagagggggcttcggcaggcaaccgaccaccaggagctggtggaaatccccaccaggccgctgctgaccaagctgagcctgatcacagccccacggcgggagagagggcgcccgtccctctacgtgcagcgggacatagtacaggagacacagcgtgaggaagaccaccggcgggagggcctgcacgtgggccgggcgtccacacccgactgggtctcggagggtccccagcccggactccggagagccctcagctcagattccatcctcaccccggccccagatgcccgtgcggccgacccagctccagaagtgaggaaggtgaaccgcatcccaccttgatgcctaccacccgtacctgagccccgggaccccccacttagaatttttcagcc

SEQ ID NO: 285 - DNA, 420 bp, Homo sapiens
ggcgttgtctgcaggcactcagaatggtccagcgtttgacataccgacgtaggctttcctacaatacagcctctaacaaaactaggctgtcccgaacccctggtaatagaattgtttacctttataccaagaaggttgggaaagcaccaaaatctgcatgtggtgtgtgcccaggcagacttcgaggggttcgtgctgtaagacctaaagttcttatgagattgtccaaaacaaagaaacatgtcagcagggcctatggtggttccatgtgtgctaaatgtgttcgtgacaggatcaagcgtgctttccttatcgaggagcagaaaatcgttgtgaaagtgttgaaggcacaagcacagagtcagaaagctaaataaaaaaatgaaacttttttgagtaataaaaatgaaaagacgctgt

SEQ ID NO: 286 - DNA, 394 bp, Homo sapiens
  misc_feature 344: n = A,T,C or G
gggccgattcctcctccttggtcgccgcgtccttggctggcgtaaaaatggctacaaacttcctagcacatgagaagatctggttcgacaagttcaaatatgacgacgcagaaaggagattctacgagcagatgaacgggcctgtggcaggtgcctcccgccaggagaacggcgccagcgtgatcctccgtgacattgcgagagccagagagaacatccagaaatccctggctggaagctcaggccccggggcctccagcggcaccagcggagaccacggtgagctcgtcgtccggattgccagtctggaagtggagaaccagagtctgcgtggcgtggtacangaacttgcagcaaggccatcttcaagctggaggccccggctgaacgtgct

SEQ ID NO: 287 - DNA, 611 bp, Homo sapiens
gccggtctctagtagtgcagcttcggctggtgtcatcggtgtccttcctccgctgccgcccccgcaaggcttcgccgtcatcgaggccatttccagcgacttgtcgcacgcttttctatatacttcgttccccgccaaccgcaaccattgacgccatgtcgggttattcgagtgaccgagaccgcggccgggaccgagggtttggtgcacctcgatttggaggaagtagggcagggcccttatctggaaagaagtttggaaaccctggggagaaattagttaaaaagaagtggaatcttgatgagctgcctaaatttgagaagaatttttatcaagagcaccctgatttggctaggcgcacagcacaagaggtggaaacatacagaagaagcaaggaaattacagttagaggtcacaactgcccgaagccagttctaaatttttatgaagccaatttccctgcaaatgtcatggatgttattgcaagacagaatttcactgaacccactgctattcaagctcagggatggccagttgctctaagtggattggatatggttggagtggcacagactggatctgggaaaacattgtcttatttgcttcctgcc

SEQ ID NO: 288 - DNA, 611 bp, Homo sapiens
ctgcgctcggtttgagggctcggcgcggggtttcctgttcctccttctgcgcggctgcagctcgggacttcggcctgacccagcccccatggcttcagaagagctacagaaagatctagaagaggtaaaggtgttgctggaaaaggctactaggaaaagagtacgtgatgcccttacagctgaaaaatccaagattgagacagaaatcaagaacaagatgcaacagaaatcacagaagaaagcagaacttcttgatagtgaaaaaccagctgctgtggttgctcccattacaacgggctatacggtgaaaatcagtaattatggatgggatcagtcagataagtttgtgaaaatctacattaccttaactggagttcatcaagttcccactgagaatgtgcaggtgcatttcacagagaggtcatttgatcttttggtaaagaatctaaatgggaagagttactccatgattgtgaacaatctcttgaaacccatctctgtggaaggcagttcaaaaaaagtcaagactgatacagttcttatattgtgtagaaagaaagtggaaaacacaaggtgggattacctgacccaggttgaaaaggagtgcaaag

SEQ ID NO: 289 - DNA, 611 bp, Homo sapiens
ccatgagttgtatatgcgccgcaggaagcctgacaccatcgaggtgcagcagatgaaggcccaggcccgggaggagaagcatcagaagcagctggagcggcaacagctggaaacagagaagaaaaggagagaaaccgtggagagagagaaagagcagatgatgcgcgagaaggaggagttgatgctgcggctgcaggactatgaggagaagacaaagaaggcagagagagagctctcggagcagattcagagggccctgcagctggaggaggagaggaagcgggcacaggaggaggccgagcgcctagaggctgaccgtatggctgcactgcgggctaaggaggagctggagagacaggcggtggatcagataaagagccaggagcagctggctgcggagcttgcagaatacactgccaagattgccctcctggaagaggcgcggaggcgcaaggaggatgaagttgaagagtggcagcacagggccaaagaagcccaggatgacctggtgaagaccaaggaggagctgcacctggtgatgacagcacccccgcccccaccaccccccgtgtacgagcccggtgagctaccatgtccaggagagcttgcag

SEQ ID NO: 290 - DNA, 611 bp, Homo sapiens
cttgccgccgccccgcagaaatgcttcggttacccacagtctttcgccagatgagaccggtgtccagggtactggctcctcatctcactcgggcttatgccaaagatgtaaaatttggtgcagatgcccgagccttaatgcttcaaggtgtagaccttttagccgatgctgtggccgttacaatggggccaaagggaagaacagtgattattgagcagagttggggaagtcccaaagtaacaaaagatggtgtgactgttgcaaagtcaattgacttaaaagataaatacaaaaacattggagctaaacttgttcaagatgttgccaataacacaaatgaagaagctggggatggcactaccactgctactgtactggcacgctctatagccaaggaaggcttcgagaagattagcaaaggtgctaatccagtggaaatcaggagaggtgtgatgttagctgttgatgctgtaattgctgaacttaaaaagcagtctaaacctgtgaccacccctgaagaaattgcacaggttgctacgatttctgcaaacggagacaaagaaattggcaatatcatctctgatgcaatgaaaaaagttggaagaaagggt

SEQ ID NO: 291 - DNA, 553 bp, Homo sapiens
gtccagcaggtccggcgcagccaccaggacttctcccggcagagggaggagctgggccagggcttgcagggcgtcgagcagaaggtgcagtctttgcaagccacatttggaacttttgagtccatcttgagaagctcccaacataaacaagacctcacagagaaagctgtgaagcaaggggagagtgaggtcagccggatcagcgaagtgctgcagaaactccagaatgagattctcaaagacctctcggatgggatccatgtggtgaaggacgcccgggagcgggacttcacgtccctggagaacacggtggaggagcggctgacggagctcaccaaatccatcaacgacaacatcgccatcttcacagaagtccagaagaggagccagaaggagatcaatgacatgaaggcaaaggttgcctccctggaagaatctgaggggaacaagcaggatttgaaagccttaaaggaagctgtgaaggagatacagacctcagccaagtccagagagtgggacatggaggccctgagaagtacccttcagactatgg

SEQ ID NO: 292 - DNA, 553 bp, Homo sapiens
ccctcgcaggcggcgccattttgtgctaggagcctgataaaaccggcccggttctgtggaaagtgggcggcggagccagggtccctggaatggcggagactctgtcaggcctaggtgattctggagcggcgggcgcggcggctctgagctccgcctcgtcagagaccgggacgcggcgcctcagcgacctgcgagtgatcgatctgcgggcggagctgaggaaacggaatgtggactcgagcggcaacaagagcgttttgatggagcggctgaagaaggcaattgaagatgaaggtggtaatcctgacgaaattgaaattacctccgagggaaacaagaaaacatcaaagaggtctagcaaagggcgcaaaccagaagaagagggtgtggaagataacgggctggaggaaaactctggggatggacaggaggatgttgagaccagtctggagaacttgcaggacatcgacatcatggatatcagtgtgttggatgaaagcagaaattgataatggaagcgttgcagattgtgtcgaagacgatgatgctgata

SEQ ID NO: 293 - DNA, 579 bp, Homo sapiens
tagccgccgactcacacaaggcaggtgggtgaggaaatccagagttgccatggagaaaattccagtgtcagcattcttgctccttgtggccctctcctacactctggccagagataccacagtcaaacctggagccaaaaaggacacaaaggactctcgacccaaactgccccagaccctctccagaggttggggtgaccaactcatctggactcagacatatgaagaagctctatataaatccaagacaagcaacaaacccttgatgattattcatcacttggatgagtgcccacacagtcaagctttaaagaaagtgtttgctgaaaataaagaaatccagaaattggcagagcagtttgtcctcctcaatctggtttatgaaacaactgacaaacacctttctcctgatggccagtatgtccccaggattatgtttgttgacccatctctgacagttagagccgatatcactggaagatattcaaatcgtctctatgcttacgaacctgcagatacagctctgttgcttgacaacatgaagaaagctctcaagttgctgaagactgaattgtaaag

SEQ ID NO: 294 - DNA, 316 bp, Homo sapiens
gcccagcctcgaaatgcagaacgacgccggcgagttcgtggacctgtacgtgccgcggaaatgctccgctagcaatcgcatcatcggtgccaaggaccacgcatccatccagatgaacgtggccgaggttgacaaggtcacaggcaggtttaatggccagtttaaaacttatgctatctgcggggccattcgtaggatgggtgagtcagatgattccattctccgattggccaaggccgatggcatcgtctcaaagaacttttgactggagagaatcacagatgtggaatatttgtcataaataaataatgaaaac

SEQ ID NO: 295 - DNA, 601 bp, Homo sapiens
ccgaggcgagatggcggccaccgagggggtcggggaggctgcgcaagggggcgagcccgggcagccggcgcaacccccgccccagccgcacccaccgccgccccagcagcagcacaaggaagagatggcggccgaggctggggaagccgtggcgtcccccatggacgacgggtttgtgagcctggactcgccctcctatgtcctgtacagagatgtttatgattacttccgagctgtcctgcagcgtgatgaaagaagtgaacgagcttttaagctaacccgggatgctattgagttaaatgcagccaattatacagtgtggcatttccggagagttcttttgaagtcacttcagaaggatctacatgaggaaatgaactacatcactgcaataattgaggagcagcccaaaaactatcaagtttggcatcataggcgagtattagtggaatggctaagagatccatctcaggagcttgaatttattgctgatattcttaatcaggatgcaaagaattatcatgcctggcagcatcgacaatgggttattcaggaatttaaactttgggataatgagctgcagtatgtggaccaacttctt

SEQ ID NO: 296 - DNA, 500 bp, Homo sapiens
gaagcgctatccgagcaggatgcggttcgtggttgccttggtcctcctgaacgtcgcagcggcgggagccgtgccgctcttggccaccgaaagcgtcaagcaagaagaagctggagtacggccttctgcaggaaacgtctccacccaccccagcttgagccaacggcctggaggctctaccaagtcgcatccggagccgcagactccaaaagacagccctagcaagtcgagtgcggaggcgcagaccccagaagacacccccaacaagtcgggtgcggaggcaaagacccaaaaagacagctccaacaagtcgggtgcggaggcaaagacccaaaaaggcagcactagcaagtcgggttcggaggcgcagaccacaaaagacagcactagtaagtcgcatccggagctgcagactccaaaagacagcactggcaaatcgggtgcggaggcgcagaccccagaagacagccccaacaggtcgggtgcggaggcaaagaccc

SEQ ID NO: 297 - DNA, 553 bp, Homo sapiens
cccactccaccttactaccagacaaccttagccaaaccatttacccaaataaagtataggcgatagaaattgaaacctggcgcaatagatatagtaccgcaagggaaagatgaaaaattataaccaagcataatatagcaaggactaacccctataccttctgcataatgaattaactagaaataactttgcaaggagagccaaagctaagacccccgaaaccagacgagctacctaagaacagctaaaagagcacacccgtctatgtagcaaaatagtgggaagatttataggtagaggcgacaaacctaccgagcctggtgatagctggttgtccaagatagaatcttagttcaactttaaatttgcccacagaaccctctaaatccccttgtaaatttaactgttagtccaaagaggaacagctctttggacactaggaaaaaaccttgtagagagagtaaaaaatttaacacccatagtaggcctaaaagcagccaccaattaagaaagcgttcaagctcaacacccactacctaaaaaatcccaaaca

SEQ ID NO: 298 - DNA, 553 bp, Homo sapiens
ggtttctgcttcctcaccaaccagtgggcagtcaccaacccgaaggacgtgctggtgggggccgactctgtgagggcagccatcaccttcagcttcttttccatcttctcctggggtgtgctggcctccctggcctaccagcgctacaaggctggcgtggacgacttcatccagaattacgttgaccccactccggaccccaacactgcctacgcctcctacccaggtgcatctgtggacaactaccaacagccacccttcacccagaacgcggagaccaccgagggctaccagccgccccctgtgtactgagcggcggttagcgtgggaagggggacagagagggccctcccctctgccctggactttcccatgagcctcctggaactgccagcccctctctttcacctgttccatcctgtgcagctgacacacagctaaggagcctcatagcctggcgggggctggcagagccacaccccaagtgcctgtgccgcctgcagtggctagaagcccagcaggtgcccatgtgctactgacaagtgcctcagct

SEQ ID NO: 299 - DNA, 601 bp, Homo sapiens
cgaaagcatggcgtcggtggtgttggcgctgaggacccggacagccgttacatccttgctaagccccactccggctacagctcttgctgtcagatacgcatccaagaagtcgggtggtagctccaaaaacctcggtggaaagtcatcaggcagacgccaaggcattaagaaaatggaaggtcactatgttcatgctgggaacatcattgcaacacagcgccatttccgctggcacccaggtgcccatgtgggtgttgggaagaataaatgtctgtatgccctggaagaggggatagtccgctacactaaggaggtctacgtgcctcatcccagaaacacggaggctgtggatctgatcaccaggctgcccaagggtgctgtgctctacaagacttttgtccacgtggttcctgccaagcctgagggcaccttcaaactggtagctatgctttgatgtcctgttgaggccatcggacagagactggagcccaggtgacaggagatggtgataccagaagtcaagggttggggtggcgacacggcctcccgaggaagaggtctgcttgatggtgactctgcaggagactctgaagtgactgct

SEQ ID NO: 300 - DNA, 503 bp, Homo sapiens
aggccgaagcgggagcggccaaaatgaagtttaatccctttgtgacttccgaccgaagcaagaatcgcaaaaggcatttcaatgcaccttcccacattcgaaggaagattatgtcttcccctctttccaaagagctgagacagaagtacaacgtgcgatccatgcccatccgaaaggatgatgaagttcaggttgtacgtggacactataaaggtcagcaaattggcaaagtagtccaggtttacaggaagaaatatgttatctacattgaacgggtgcagcgggaaaaggctaatggcacaactgtccacgtaggcattcaccccagcaaggtggttatcactaggctaaaactggacaaagaccgcaaaaagatcctcgaacggaaagccaaatctcgccaagtaggaaaggaaaagggcaaatacaaggaagaaaccattgagaagatgcaggaataaagtaatcttatatacaagctttgattaaaacttgaaacaaag

SEQ ID NO: 301 - DNA, 601 bp, Homo sapiens
atgcagaggctgcaggtagtgctgggccacctgaggggtccggccgattccggctggatgccgcaggccgcgccttgcctgagcggtgccccgcaggcctcggccgcggacgtggtggtggtgcacgggcggcgcacggccatctgccgggcgggccgcggcggcttcaaggacaccacccccgacgagcttctctcggcagtcatgaccgcggttctcaaggacgtgaatctgaggccggaacagctgggggacatctgtgtcggaaatgtgctgcagcctggggccggggcaatcatggcccgaatcgcccagtttctgagtgacatcccggagactgtgcctttgtccactgtcaatagacagtgttcgtcggggctacaggcagtggccagcatagcaggtggcatcagaaatgggtcttatgacattggcatggcctgtggggtggagtccatgtccctggctgacagagggaaccctggaaatattacttcgcgcttgatggagaaggagaaggccagagattgcctgattcctatggggataacctctgagaatgtggctgagcggtttggcatttcacgggagaagcaggata

SEQ ID NO: 302 - DNA, 581 bp, Homo sapiens
  misc_feature 496: n = A,T,C or G
actatagggcgaattgggccctctagatgcatgctcgagcggccgcccttttttttttttttttacactcagattgtttatttaaaaatgcccaaaacacaaaaatagacttttaaggtaataatatatattactaaatatattatagtctacttataataattatatcgtcgttttcaatattacaaaaaaaggaagaaaaatacaagggaagcagacgacccaatatatataaatactataaaatcatattagaataaataaagtcgtcataaataaagggcccattgatttatgggtggggtttggcaacggctttggctacttgcttttggagggtaatttgagcaccaggattccccctcaggagaggttccagttaccaggagacactggaacctcaggtctataaaaactggaggggcagtgaaggcctattattcacagcacataagattctaggagacagatttgggcagggaagaggtgggggganaggggttcattgcctcccttaaatatgctacaattttttttcccccaagaacctcggaagacactccatcccccaccatcatgaa

SEQ ID NO: 303 - DNA, 200 bp, Homo sapiens
agggcgaatgggccctctacatgcatgctcgagcggccgccctttttttttttttttgagagaaaagagtattaaatagaaataatatcagggaaaataaaagcctggtcccaaaataaaagggccattaattgaagagaacgattttactttttcttgacaataaacagcattatccctattattaggtcgacgcggcc

SEQ ID NO: 304 - DNA, 582 bp, Homo sapiens
ctttttttttttttttttactttgacaacaaattatattttaaatgtttcatatttacttttatatttccatacaatcagaaacagtaaaaaaaatttggagagcacataaaaacatcttaaagttaaaaatataaagccttgtatttaaaaatgcagtcatttaaataatattataagaatctatttgtacataataaacaagtttcaaccagcaagaaattactaatattgactgtggagttttggctgttttaatagttctaactcattattccgtaattcaacacagcactaccaacacagctggcaatgacaagactgggagtatcaaactaggattgttagttcaattaaaatttcagataaacaataatgtacttatactaaaaaattatttgttgtttatctgaaatgaaaatttaactgggtacccaattgtttgtttgtttaatctaaaaaccctgattgaaatttatctaataaaacatcatttaatatctaaaataaaataaatttactataacatctttataactattcaatcaatgattcatcttctatttttccaaattcttgcaca

SEQ ID NO: 305 - DNA, 122 bp, Homo sapiens
tatagggcgattgggccctctagatgcatgctcgagcggccgcccttttttttttttttttttttttttttttttttttttttttttttttttttttttttttttttttttttttttttttt

SEQ ID NO: 306 - DNA, 612 bp, Homo sapiens
  misc_feature 30, 86, 122, 126, 128, 167, 171, 175, 255, 257, 277, 325,341, 343, 368, 438, 471, 518, 520, 523, 564, 567, 583: n = A,T,C or G
actcactatagggcgaattgggccctctanatgcatgctcgagcggccgccctttttttttttttttttttttttttttttttttngcagttatttttaaaactttattttaaaaatatgancatntnttttaaaagttttgataattattgccattattttcttgngatnggtncaatttaaaaataagtctatgttttcacattgattttaaaaaatatagcatgtttgaattacaaatgattaagcaaactntnttacttcatagctgaccatnttccaaaaaattcccacttaattgaatacttaaaaaaaaatggccagnggccgattgaaaggtntnttaaaattaagggcagttttaattntgaaaacaaatatcttcatggaaatctatttgtaagcttctgaaattgctgctgaaagtctacagtctgngaatataccaattcccctttacaactgatgcanatcattatgaaatactggaaggcataccctacaatttaggaattggngnggntgccactgctatgctctcaattgcacactcatcagttcctntgnggatccgagctcggtnccaagcttggcgtaatcatgggcatagct

SEQ ID NO: 307 - DNA, 524 bp, Homo sapiens
  misc_feature 1, 262: n = A,T,C or G
nactcactatagggcgaattgggccctctacatgcatgctcgagcggccgccctttttttttttttttgttatttttaaaactttattttaaaaatatgagcatctattttaaaagttttgataattattgccattattttcttgtgattggtacaatttaaaaataagtctatgttttcacattgattttaaaaaatatagcatgtttgaattacaaatgattaagcaaactctattacttcatagctgaccatcttccanaaaattcccacttaattgaatacttagaaaaaaatggccagtggccgattgaaaggtatattaaaattaagggcagttttaattctgaagacaaatatcttcatggaaatctatttgtaagcttctgagattgctgctgaaagtctacagtctgtgaatataccaattcccctttacaactgatgcagatcattatgaaatactggaaggcataccctacaatttaggaattggtgtggctgccactgctatgctctcaatt

SEQ ID NO: 308 - DNA, 68 bp, Homo sapiens
gcccttttttttttttttttttttttttttttttttttttttttttttttttttaaggggaaaacccg

SEQ ID NO: 309 - DNA, 542 bp, Homo sapiens
  misc_feature 32, 37, 96, 148, 150, 156, 204, 206, 252, 265, 285, 288,290, 332, 341, 343, 357, 359, 365, 367, 409, 475, 486, 508,510: n = A,T,C or G
cttttttttttttttttttttttttttttganatcanaattaaattctttaatacaaaatgctttttttttttaagatatatctgtatttctttgncgttgtttaaaaataaatatgtactacggaatatctcgaaaaactgcactananacaaanacgtgatgttaatatcttttccccacaattattacggataaacagtancnccaataaataaatgataacaaatattaaaattaaaaaaggagaganatttagtatgtanaattctctattttttcttgnttngnttttacatataaaaaacagaatagcaatgtctattttatcanaatcacatntntacataaacatatntntatatntntacacacaaatacaagttgccaaatatatatatagtatgtanatgtatattgaaaccttatttcaaaggaatgtgtgctggggagccaggggatcggggagggcaaanctgagtgttancaaaattaaatatctgttcaananaagctagtgactgtcaccgatcagggagagag

SEQ ID NO: 310 - DNA, 398 bp, Homo sapiens
  misc_feature 37, 364, 384: n = A,T,C or G
gtatacgactcactatagggcgaattgggccctctanatgcatgctcgagggtgtaaagcaggccctctggctcaccaagaccaagttaatagaaggccttcccgagaaagtgcttagccttgttgatgatccaaggaaccacatagagaaccaagacgagtgcgttctgaatgtgatctctcacgcccgtctctggcagaccactgaggaaatccccaagagagagacctactgcccggtcatcgtggacaacctaatacagctgtgtaaatctcagattctcaagcatccttctctggccaggaggatctgtgtccaaaactccacgttttctgctacctggaaccgagagtctcttctccntcaagtccgtggttctggtngagcccgactgagc

SEQ ID NO: 311 - DNA, 412 bp, Homo sapiens
agggcgaattgggccctctacatgcatgctcgagcggccgccctttttttttttttttactttgacaacaaattatattttaaatgtttcatatttacttttatatttccatacaatcagaaacagtaaaaaaaatttggagagcacataaaaacatcttaaagttaaaaatataaagccttgtatttaaaaatgcagtcatttaaataatattataagaatctatttgtacataataaacaagtttcaaccagcaagaaattactaatattgactgtggagttttggctgttttaatagttctaactcattattccgtaattcaacacagcactaccaacacagctggcaatgacaagactgggagtatcaaactaggattgttagttcaattaaaattcagataaacaat

SEQ ID NO: 312 - DNA, 538 bp, Homo sapiens
  misc_feature 14, 492: n = A,T,C or G
attgggccctctanatgcatgctcgagcaccgtcattaccccgagcacctgcagccccaggaagtcctggccgtcctcgctcaccaggagcccctcttggacccatgggtccaggagctccattttcgcctggaagaccattttcaccctttaatccaggagcacctgtttcacccttttctccatttcgtccatcgaagcctctgtgtcctttcataccagggaatccaggtatcccagctggacctttgatacctggaggtccaggcaatcctcgctctccaggtcgtccgggtctacctgattctccatcttttccagcaggaccagatggacctatagcaccaggaggtcctggagggcctgaaggaccagcttgcccaggttcaccagggggtccttggtatcctggagatccaggggaaccaggatgaccagatgtaccagggggaccgggagggcctggggggccagctggtccaggatagcctncgagtcctcctactgctactccagacttgacatcatatgaatcata

SEQ ID NO: 313 - DNA, 277 bp, Homo sapiens
  misc_feature 65: n = A,T,C or G
tgggccctctacatgcatgctcgagcggccgccctttttttttttttttcttgacccagttaaanttttattcagtgaaaaaagttgacattgagacaaaaattatcttaaagttgtgcaacaatacagtaaaaccttcagcagatttcagtgacttggaaacttatcgaggcaattgaaattataaatacttaatttcgctttggagagaaacaagtatacagtgtttcactttaaataagagtagaataggcctttattttgcgtcgacgcggcc

SEQ ID NO: 314 - DNA, 478 bp, Homo sapiens
gcatgctcgagtcgtcatggctctgctcggccttccatctcttgtacctgtcgatgagctcggtcaagtaggaagttttctttgcattgcgtagtataaacttgtgcttcaataactccttagcagtgggtctaaagctcggctccttattcaaacaggcctccacaaactccttgaggggtttactgtagtttccttccaacgtcggtgggttgttctttggaatgaggaataaaactttcatggggtgcagctcggaatgaggtggttcccctcttgcaagttcaatagctgttatgcccagggaccagatgtctgccttcgagtcataggccgactgtttgatgacctcgggtgccatccagaatggggtgcccacgaaggtgttccttttgatctgggtgtctgtcagctggccagccacgccaaagtccgccagcttcacctcgccatgctcagacagcaggacgttggccgc

SEQ ID NO: 315 - DNA, 292 bp, Homo sapiens
  misc_feature 93: n = A,T,C or G
gggccctctacatgcatgctcgagcggccgccctttttttttttttttttttttgatgaaatagataattcaggttgtcatttataattttanagtttgcttcacatatacaatgctgtgttacgaaacaatgaacacttttataaaaaatttatttcacacttttatacaaatatccacaggtaatttctaatcatgaaataattttacaatgctagttagtacaaaaatgtatcaaatgcaaacagaccagtgacttgacttgagatgacatttttaaaaccataaatct

SEQ ID NO: 316 - DNA, 525 bp, Homo sapiens
  misc_feature 31: n = A,T,C or G
gactcactatagggcgaattgggccctctanatgcatgctcgaggacgcctagatctctttcccagggccatggcgaacccgaagctgctgggactggagctaagcgaggcggaggcgatcggtgctgattcggcgcgatttgaggagctgctgctgcaggcctcgaaggagctccagcaagcccagacaaccagaccagaatcgacacaaatccagcctcagcctggtttctgcataaagaccaactcctcggaagggaaggttttcatcaacatctgccactccccctctatccctcctcccgccgacgtgaccgaggaggagctgcttcagatgctagaggaggaccaagctgggtttcgcatccccatgagtctgggagagcctcatgcagaactggatgcaaaaggccagggatgtaccgcctacgacgtagctgtcaacagcgacttctaccggaggatgcagaacagcgatttcttgcgggagctcgtgatcaccatcgccagggagggccttgagga

SEQ ID NO: 317 - DNA, 552 bp, Homo sapiens
  misc_feature 31, 424, 517, 524: n = A,T,C or G
gactcactatagggcgaattgggccctctanatgcatgctcgagcaccgtcattaccccgagcacctgcagccccaggaagtcctggccgtcctcgctcaccaggagcccctcttggacccatgggtccaggagctccattttcgcctggaagaccattttcaccctttaatccaggagcacctgtttcacccttttctccatttcgtccatcgaagcctctgtgtcctttcataccagggaatccaggtatcccagctggacctttgatacctggaggtccaggcaatcctcgctctccaggtcgtccgggtctacctgattctccatcttttccagcaggaccagatggacctatagcaccaggaggtcctggagggcctgaaggaccagcttgcccaggttcaccaggggtccttggtatnctggagatccaggggaaccaggatgaccagatgtaccagggggaccgggagggcctggggggccagctggtccaggatagcctgcgagtcctnctactgntactccagacttgacatcatatgaatca

SEQ ID NO: 318 - DNA, 423 bp, Homo sapiens
  misc_feature 83: n = A,T,C or G
actcactatagggcgaattgggccctctagatgcatgctcgagcggccgcgtcgaccagaaatgcattataaatgtttttaantgtgttctgttttttgcagtctttaagtgccatgccaattgttcttatattctatagaagttcgctcaaaatactcaacaggggaataggcagcggacagtcagaatggttggaattttggctttctaagaaaaactttattttgcataagcatgtggtcagatcattttgtgcatatgcagcctggattggatgttaagtaaatgcttgttcagtgccggtacatttacttaaatctgtttttatttttgtcatgtagaatactactgtggtcatcataatgtaatctatttctgtaccttttttttttttttttactttgaagtctttaaataaaatg

SEQ ID NO: 319 - DNA, 273 bp, Homo sapiens
  misc_feature 30: n = A,T,C or G
gataagaaggcagttatccagcatttccangagaaagtggaatctttggaacaggaagcagccaacgagagacagcagctggtggagacacacatggccagagtggaagccatgctcaatgaccgccgccgcctggccctggagaactacatcaccgctctgcaggctgttcctcctcggcctcgtcacgtgttcaatatgctaaagaagtatgtccgcgcagaacagaaggacagacagcacaccctaaagcatttcgagcatgtgcgcatg

SEQ ID NO: 320 - DNA, 569 bp, Homo sapiens
  misc_feature 19, 522, 528: n = A,T,C or G
ctttttttttttttttaanatatatctgtatttctttgtcgttgtttaaaaataaatatgtactacggaatatctcgaaaaactgcactagagacaaagacgtgatgttaatatcttttccccacaattattacggataaacagtagcaccaataaataaatgataacaaatattaaaattaaaaaaggagagagatttagtatgtagaattctctattttttcttgttttgtttttacatataaaaaacagaatagcaatgtctattttatcagaatcacatatatacataaacatatatatatatatatacacacaaatacaagttgccaaatatatatatagtatgtagatgtatattgaaaccttatttcaaaggaatgtgtgctggggagccaggggatcggggagggcagagctgagtgttagcaaaattaaatatctgttcaagataagctagtgactgtcaccgatcagggagagagagattggaaacatgaattttatatacaaaaaccggtncaaatnagagagcaagagagagcaaaagatacatctcataaatagtt

SEQ ID NO: 321 - DNA, 539 bp, Homo sapiens
  misc_feature 20, 23, 51, 61, 71: n = A,T,C or G
gcatgctcgagcggccgcanccntgtcccgggggcccgaggaggtgaacanggtcacgganagcacctacnggaatgttatggaacagttcaatcctgggctgcgaaatttaataaacctggggaaaaattatgagaaagctgtaaacgctatgatcctggcaggaaaagcctactacgatggagtggccaagatcggtgagattgccactgggtcccccgtgtcaactgaactgggacatgtcctcatagagatttcaagtacccacaagaaactcaacgagagtcttgatgaaaattttaaaaaattccacaaagagattatccatgagctggagaagaagatagaacttgacgtgaaatatatgaacgcaactctaaaaagataccaaacagaacacaagaataaattagagtctttggagaaatcccaagctgagttgaagaagatcagaaggaaaagccaaggaagccgaaacgcactcaaatatgaacacaaagaaattgagtatgtggagaccgttacttctcgtcagagtg

SEQ ID NO: 322 - DNA, 539 bp, Homo sapiens
  misc_feature 54, 144, 243, 258, 275, 301, 380, 412, 430, 507, 521, 529: n = A,T,C or G
gccctctcgatgcatgctcgagcggccgcccttttttttttttttttttttttngaatttctctctttattaagtctacccccagccacggaaagaggagtagaccatgattactgtgaacccccccttaccccaggacactgngaatctcttcttgcctgtgccctccccctccccctgcccaataaataaaaaggggacaaggaagtacacagcgagggaagggaggagtgtgcacccagnacagtgtctgtgtanagggtgagctgggcganaataaatagaccatggaccccatggnggggataaggaaggacctcgcattggccaaggcaggggcaggcgaggcgctgagtgcccttgcccaaggccaggagcanagggtgggagcccgcctgcagctggagcctanctttgcggggcagggganatccctgatggcagcttcctggtcaagcttgcccttgtcaagtcctgccacgaggggctgagcattctgttgccaanaccaccattgcctntcctcgtntcccccagtg

SEQ ID NO: 323 - DNA, 484 bp, Homo sapiens
  misc_feature 81, 163, 177, 257, 306, 323, 374, 417, 428, 469: n = A,T,C or G
gccctctagatgcatgctcgagcggccgccctttttttttttttttttttttttttttttttttggctctaaagggggtanagggggtgctatagggtaaatacgggccctatttcaaagatttttaggggaattaattctaggacgatgggcatgaaactgnggtttgctccacanatttcaaagcattgaccgtagtatacccccggtcgtgtagcggtgaaagtggtttggtttaaacgtccgggaattgcatntgtttttaagcctaatgtggggacagctcatgagtgcaagacgtcttgngatgtaattattatacnaatgggggcttcaatcgggagtactactcgattgtcaacgtcaaggagtcncaggtcgcctggttctaggaataatgggggaagtatgtagganttgaaaattantccgccgtagtcggggtactcgtaggttcagtaccattggnggccaattgatttga

SEQ ID NO: 324 - DNA, 687 bp, Homo sapiens
  misc_feature 2, 32: n = A,T,C or G
cnactcactatagggcgaattgggccctctanatgcatgctcgagctattggagtgagacgagcagcagcagctgtggaacccagcagctcccagaggtgctgcagtgccagccccagcattaccactgctaccatcagtcaagccaagcccagcagcctccagaaaaaaatgtagtgtatgagcgagtgaggacctacagtgggcccatgaacaaggtggtgcaggccttggaccccttcaactcacgggaagtgctctcccctctcaaaaccacctcctcctaccaaaatttggtttggagcgaccattctcaggaactccattctccaactttaaaaatatctacatgtgccccaagtactctacatataacccaaaatactgaacaggaacttcattctccaacagtgaaacttactacatatccacagaccactattaggaaatatgtagtacaaaatcctgaacaggaaccactgtctcaattcctaagaggaagccatttcttcccaggaaacaatgttatttatgaaaaaacaataagaaaagtggagaagctaaatactgatcaggggtgccatcctcaggctcaatgccatcatcacattatccaacagccccaggtcatccactctgcacactggcaacaacctgattctagccagcaaatccaagccatcacagg

SEQ ID NO: 325 - DNA, 780 bp, Homo sapiens
  misc_feature 36, 768: n = A,T,C or G
tatacgactcactatagggcgaattgggccctctanatgcatgctcgagctattggagtgagacgagcagcagcagctgtggaacccagcagctcccagaggtgctgcagtgccagccccagcattaccactgctaccatcagtcaagccaagcccagcagcctccagaaaaaaatgtagtgtatgagcgagtgaggacctacagtgggcccatgaacaaggtggtgcaggccttggaccccttcaactcacgggaagtgctctcccctctcaaaaccacctcctcctaccaaaatttggtttggagcgaccattctcaggaactccattctccaactttaaaaatatctacatgtgccccaagtactctacatataacccaaaatactgaacaggaacttcattctccaacagtgaaacttactacatatccacagaccactattaggaaatatgtagtacaaaatcctgaacaggaaccactgtctcaattcctaagaggaagccatttcttcccaggaaacaatgttatttatgaaaaaacaataagaaaagtggagaagctaaatactgatcaggggtgccatcctcaggctcaatgccatcatcacattatccaacagccccaggtcatccactctgcacactggcaacaacctgattctagccagcaaatccaagccatcacaggaaataatccaatttctacacatattggaaatgaactgtgccatagtggatcaagccagatttgtgagcaggtgatanttcaggatgatg

SEQ ID NO: 326 - DNA, 634 bp, Homo sapiens
  misc_feature 629: n = A,T,C or G
tatacgactcactatagggcgaattgggccctctagatgcatgctcgagaagtaattatcagttggtttggatttttggaccaccgttcagtcattttgggttgccgtgctcccaaaacattttaaatgaaagtattggcattcaaaaagacagcagacaaaatgaaagaaaatgagagcagaaagtaagcatttccagcctatctaatttctttagttttctatttgcctccagtgcagtccatttcctaatgtataccagcctactgtactatttaaaatgctcaatttcagcaccgatggccatgtaaataagatgatttaatgttgattttaatcctgtatataaaataaaaagtcacaatgagtttgggcatatttaatgatgattatggagccttagaggtctttaatcattggttcggctgcttttatgtagtttaggctggaaatggtttcacttgctctttgactgtcagcaagactgaagatggcttttcctggacagctagaaaacacaaaatcttgtaggtcattgcacctatctcagccataggtgcagtttgcttctacatgatgctaaaggctgcgaatgggatccgagctcggtaccaagcttggcgtaatcntggtc

SEQ ID NO: 327 - DNA, 557 bp, Homo sapiens
  misc_feature 14: n = A,T,C or G
attgggccctctanatgcatgctcgagagatcttacatttccactataccacatggcctgactttggagtccctgaatcaccagcctcattcttgaactttcttttcaaagtccgagagtcagggtcactcagcccggagcacgggcccgttgtggtgcactgcagtgcaggcatcggcaggtctggaaccttctgtctggctgatacctgcctcttgctgatggacaagaggaaagacccttcttccgttgatatcaagaaagtgctgttagaaatgaggaagtttcggatggggctgatccagacagccgaccagctgcgcttctcctacctggctgtgatcgaaggtgccaaattcatcatgggggactcttccgtgcaggatcagtggaaggagctttcccacgaggacctggagcccccacccgagcatatccccccacctccccggccacccaaacgaatcctggagccacacaatgggaaatgcagggagttcttcccaaatcaccagtgggtgaaggaagagacccaggaggataaagactgccccatc

SEQ ID NO: 328 - DNA, 90 bp, Homo sapiens
ctatagggcgaattgggccctctagatgcatgctcgagcggccgcccttttttttttttttttttttttttttttttttttttttttttt

SEQ ID NO: 329 - DNA, 586 bp, Homo sapiens
tatacgactcactatagggcgaattgggccctctagatgcatgctcgagatagcagaacacagcgaggtcccaagaacatcgcacaaaaatagattgtaccgttttgtttgtgagaacaaacaatttggaactttgatgagctgtgcaaccccagagacacactatcaaggtgtccattttaaagtgagaaatactgctcccatccacacgcggcgcgtcgggggaatgagcatgcgcggtgtgaagggcgtgttttctagaggtattcctgacttcctcactggtggtgaggtccatggttaagtgctcttaaatgctgctttcaaagcttactttggagttctgagatcaggatctcaatttcaaaagtttgtttccttcagtttcctaagtacaagacacacttggacattcctcctaggcaagtaacacagtaagccagaaaactggaagaaaggtctgggagaggacacgaggagagcaaagagggggattgctgagatgtggacattgcttattcggtctaagaattcttggatgcttcaaattgattggaatgtatagtctctcagagacaaattttta

SEQ ID NO: 330 - DNA, 230 bp, Homo sapiens
  misc_feature 31: n = A,T,C or G
gactcactatagggcgaattgggccctctanatgcatgctcgagctgaaacaaaagcaagaaagcagcagaaagcatcaagcaagaagcaagcttgaaagatggggtttatccctggaggcagatagctaacagcatctgcctgttagtttggaattgacctgcagagacaaaaccttcggctagtagtaagggtcagggagcttacacttaagacaaggcattcaatca

SEQ ID NO: 331 - DNA, 645 bp, Homo sapiens
  misc_feature 2, 31, 32, 33: n = A,T,C or G
cnactcactatagggcgaattgggccctctnnnatgcatgctcgagtctttaatataaccccaaatgaaagaaccaaggggaggggtgggatggcacttttttttgttggtcttgttttgttttgttttttggttggttggttcgttattttttaagattagccattctctgctgctatttccctacataatgtcaatttttaaccataattttgacatgattgagatgtacttgaggcttttttgttttaattgagaaaagactttgcaattttttttttaggatgagcctctcctagacttgacctagaatattacatattcctccagtaagtaatactgaagagcaaaagagaggcaggattggggtcacagccgcttcttcagcatggaccaagtgggccttggggattgcagcgttctcgaagtggctgtaggactcgaatttacagaaagccacagaggtgcaacttgaggctctgctagcaagccaccagtgaggctattgggtaaccacctttctatacaggagattggaatctactttgtcatttatccaccacagtgacaaaggaaaagtggtgccgttatgcaatccatttaactcataaacatattactctgagtaactggccagccattcat

SEQ ID NO: 332 - DNA, 667 bp, Homo sapiens
  misc_feature 21, 238, 632: n = A,T,C or G
tagggcgattgggccctctanatgcatgctcgagcggccgcccttttttttttttttttagttatagagctaattggcttttatttgtgatttatgaattaaagcagcaccactctacaagtacagtgatagctccccctgggcaatacaatacaagaacagtgggttttgtcaaattggaacaaggaaacagaaccacagaaataaatacattggttaacatcagattagttcaggntacttttttgtaaaagttaaagtagaggggacttctgtattatgctaactcaagtagactggaatctcctgtgttctttttttttttaaattggttttaattttttttaattggatctatcttcttccttaacatttcagttggagtatgtagcatttagcaccactggctcaatgcgctcacctaggtgagagtgtgaccaaatcttaaagcattagtgctattatcagttaccaccatttggggcttttatccttcatgggttatgctgttctcctgatgacacatttctctgagttttgtaattccagccaaagagagaccattcactatttgatggctggctgcatgcaaacatttaaagcttttagagaatacactacaccagggagtntgactactagtatgactattaggagggtaatacca

SEQ ID NO: 333 - DNA, 460 bp, Homo sapiens
tgggccctctagatgcatgctcgagcggccgccctttttttttttttttttttactttgacaacaaattatattttaaatgtttcatatttacttttatatttccatacaatcagaaacagtaaaaaaaatttggagagcacataaaaacatcttaaagttaaaaatataaagccttgtatttaaaaatgcagtcatttaaataatattataagaatctatttgtacataataaacaagtttcaaccagcaagaaattactaatattgactgtggagttttggctgttttaatagttctaactcattattccgtaattcaacacagcactaccaacacagctggcaatgacaagactgggagtatcaaactaggattgttagttcaattaaaatttcagataaacaataatgtacttatactaaaaaattatttgttgtttatctgaaatgaaaatttaa

SEQ ID NO: 334 - DNA, 392 bp, Homo sapiens
  misc_feature 238: n = A,T,C or G
ctttttttttttttttttaggaagcagaaaaccaatcatccctctttctctttcccagcgtggctggccaccaccaaaaacaggtatttcttttttaagccgatgacacacagtattacaaagacagagataactgccctgggtcatgggaggaggggaggctttataaccaagtaaatttggagaaatactggattaaaaaaagctaagcaagtttctttactgaagggcttcttanagccattaataagcttattaataagcttataggctccttcgttctctaagaggggaacatttcatcatggaatccactcctcatagagcatctcggaggaccaagttttcactttgagaaacacttccagaaacccagcccgttatcatctctg

SEQ ID NO: 335 - DNA, 355 bp, Homo sapiens
  misc_feature 19, 71: n = A,T,C or G
gggcgaatgggccctctanatgcatgctcgagcggccgcccttttttttttttttttacactcagattgtnatttaaaaatgcccaaaacacaaaaatagacttttaaggtaataatatatattactaaatatattatagtctacttataataattatatcgtcgttttcaatattacaaaaaaaggaagaaaaatacaagggaagcagacgacccaatatatataaatactataaaatcatattagaataaataaagtcgtcataaataaagggcccattgatttatgggtggggtttggcaacggctttggctacttgcttttggagggtaatttgagcaccaggattccccc

SEQ ID NO: 336 - DNA, 442 bp, Homo sapiens
  misc_feature 382: n = A,T,C or G
ggcggagcagcaacagttctacctgctcctgggaaacctgctcagccccgacaatgtggtccggaaacaggcagaggaaacctatgagaatatcccaggccagtcaaagatcacattcctcttacaagccatcagaaatacaacagctgctgaagaggctagacaaatggccgccgttctcctaagacgtctcttgtcctctgcatttgatgaagtctatccagcacttccctctgatgttcagactgccatcaagagtgagctactcatgattattcagatggaaacacaatctagcatgaggaaaaaagtttgtgatattgcggcagaactggccaggaatttaatagatgaggatggcaataaccagtggcccgaaggnttgaagttcctttttgattcagtcagctctcaaaatgtgggactgcgggaagctgccctt

SEQ ID NO: 337 - DNA, 529 bp, Homo sapiens
  misc_feature 503: n = A,T,C or G
gcatgctcgagcggccgcagcgaggagaagatctcggactcggaggggtttaaagccaatttgtctctcttgaggaggcctggagagaaaacttacacacagcgatgtcggttgtttgttgggaatctacctgctgatatcacggaggatgaattcaaaagactatttgctaaatatggagaaccaggagaagtttttatcaacaaaggcaaaggattcggatttattaagcttgaatctagagctttggctgaaattgccaaagccgaactggatgatacacccatgagaggtagacagcttcgagttcgctttgccacacatgctgctgccctttctgttcgtaatctttcaccttatgtttccaatgaactgttggaagaagcctttagccaatttggtcctattgaagggctgttgtaatagtggatgatcgtggaagatctacagggaaaggcattgttgaatttgcttctaagccagcagcaagaaaggcatttgancgatgcagtgaaggtgttttcttact

SEQ ID NO: 338 - DNA, 588 bp, Homo sapiens
  misc_feature 12: n = A,T,C or G
tgggccctctanatgcatgctcgagtcggccagctggatctcccacaaggtttccttgttaaaagggtgcttaagtaacctggccggcagcacgacttatgatgaagcacgaagaagccaggttctgtgtcgatcactctctcagtcccctcaactgctcatcttaaactatttggttcctgacacgtttccaaaaggggaaaggggaaaaggggaaggggggaaggggaacataaaaagtatttgttacatttaaaaagggggggaaggggaaagagctgtatctatgttcacctcattcaacttccttgagttatggcactatgatgttgcttaattaggtaagacatggatatttgcaccgagtgcaaatactgttcataacaaggtcatagctagaaagacagatgggctcaagtgtggacaaataatgtcatcaaggtaatagatcaaaaatattaaagccctataaaagatctgagcagtcaactccaaaacatccacatgacaaagtccttaaaatacaaatctcattactcttactcatgcaactgctaaaaaatagtgtgcagatatgtatttatattt

SEQ ID NO: 339 - DNA, 97 bp, Homo sapiens
gccctctagatgcatgctcgagcggccgcccttttttttttttttttttttttttttttttttttttttttttttttttttttaaaagggcaaatgg

SEQ ID NO: 340 - DNA, 636 bp, Homo sapiens
  misc_feature 2, 32: n = A,T,C or G
cnactcactatagggcgaattgggccctctanatgcatgctcgagcggccgcccttttttttttttttttttactttgacaacaaattatattttaaatgtttcatatttacttttatatttccatacaatcagaaacagtaaaaaaaatttggagagcacataaaaacatcttaaagttaaaaatataaagccttgtatttaaaaatgcagtcatttaaataatattataagaatctatttgtacataataaacaagtttcaaccagcaagaaattactaatattgactgtggagttttggctgttttaatagttctaactcattattccgtaattcaacacagcactaccaacacagctggcaatgacaagactgggagtatcaaactaggattgttagttcaattaaaatttcagataaacaataatgtacttatactaaaaaattatttgttgtttatctgaaatgaaaatttaactgggtacccaattgtttgtttgtttaatctaaaaaccctgattgaaatttatctaataaaacatcatttaatatctaaaataaaataaatttactataacatctttataactattcaatcaatgattcatcttctatttttccaaattcttgcaca

SEQ ID NO: 341 - DNA, 640 bp, Homo sapiens
  misc_feature 2, 350, 565, 566, 637: n = A,T,C or G
cnactcactatagggcgaattgggccctctacatgcatgctcgagcggccgcccttttttttttttttttttttatggaatatttgatttattctaaaatttgtgaatatttaaaaattttcaatataaaaagccagaggcctgggcagggacaggcccaaagatgtctctgcctgagaactaagtgatggggcaaacccacttaatagtggccagagagcaaaggagagttataagaaaccgtaaaccaggctagggcagattcaccttcctaggggcaagacaaagaaggaagggggtagacagagcctactaagtaagctgcttatcccttctgccacatggttcanattcaatctaagaatgtgtatggtgacacctagtcagagacaggccctggcaggggacataaaaaacaaataaggcttcacccttcctctcaaagagcttacatgcaaagacgaaggaccaaccaggtacagaccagatgcacagttactgagcttatgctttgataaatgcttagccagcagcatcaatgaacactatgaaagcccaaaaagannaggcagttgaatctttcctcaggccatccagcattattagttaaaatctgatttcatccttgggggatgcntac

SEQ ID NO: 342 - DNA, 110 bp, Homo sapiens
  misc_feature 19, 20, 105: n = A,T,C or G
ggcgattgggccctctagnngcatgctcgagctgccgccctttttttttttttttttttttttttttttttttttttttttttttttttttttttttttttttgnaaaaa

SEQ ID NO: 343 - DNA, 557 bp, Homo sapiens
gccctctagatgcatgctcgagtctttaatataaccccaaatgaaagaaccaaggggaggggtgggatggcacttttttttgttggtcttgttttgttttgttttttggttggttggttcgttattttttaagattagccattctctgctgctatttccctacataatgtcaatttttaaccataattttgacatgattgagatgtacttgaggcttttttgttttaattgagaaaagactttgcaattttttttttaggatgagcctctcctagacttgacctagaatattacatattcctccagtaagtaatactgaagagcaaaagagaggcaggattggggtcacagccgcttcttcagcatggaccaagtgggccttggggattgcagcgttctcgaagtggctgtaggactcgaatttacagaaagccacagaggtgcaacttgaggctctgctagcaagccaccagtgaggctattgggtaaccacctttctatacaggagattggaatctactttgtcatttatccaccacagtgacaaaggaaaagtg

SEQ ID NO: 344 - DNA, 592 bp, Homo sapiens
  misc_feature 350, 480: n = A,T,C or G
gccctctagatgcatgctcgagcggccgcccttttttttttttttttttacactcagattgtttatttaaaaatgcccaaaacacaaaaatagacttttaaggtaataatatatattactaaatatattatagtctacttataataattatatcgtcgttttcaatattacaaaaaaaggaagaaaaatacaagggaagcagacgacccaatatatataaatactataaaatcatattagaataaataaagtcgtcataaataaagggcccattgatttatgggtggggtttggcaacggctttggctacttgcttttggagggtaatttgagcaccaggattccccctngggagaggttccagttaccaggagacactggaacctcaggtctataaaaactggaggggcagtgaaggcctattattcacagcacataagattctaggagacagatttgggcagggaagaggtggggganagggttcattgcctcccttaaatatgctacaattttttttcccccaagaacctcggaagacactccatcccccaccattatgaatactgagcttgcacacttggggacctgc

SEQ ID NO: 345 - DNA, 634 bp, Homo sapiens
  misc_feature 65, 280, 553, 568, 609: n = A,T,C or G
tgggccctctagatgcatgctcgagcggccgcccttttttttttttttttatatttttttatttngttttctagtttatgttttatgctatttttattccatactcctccgaaattctatttttaactttattatttttattttttcatctatattctactttttctttacctcgaattcttctttcgtattcctttttaattggttaattctcagtacgaattcttattattatataaattttttatatttttttatatcacttatgtttttcttttanattatttgctttcattctctgttatttatttttattaatttaaatttaatagcaaatttttttttgaaaactttgttctcattagttatttctttttaatttatttcttttatcttcatttttgtttattattcgaaagttattttctaaatttattattttatcttagtttatgattattctccatttatattttaattttcttacctgcctaatcctattctattttttcactatcaatatttaatacttctattttattacttttacttnaaaaaatatttttgngattcttataataaattaaaatattatttaactacttaatnattcctttaacaatttttcttttag

SEQ ID NO: 346 - DNA, 97 bp, Homo sapiens
  misc_feature 83, 84, 86: n = A,T,C or G
tatagggcgattgggccctctagatgcatgctcgagcggccgccctttttttttttttttttttttttttttttttttttttnnangggaaaaaaaa

SEQ ID NO: 347 - DNA, 362 bp, Homo sapiens
  misc_feature 25: n = A,T,C or G
cctatagggcgaatgggccctctanatgcatgctcgagcgcatgggccccgccatgggcccggccctgggcgctggcattgagcgcatgggcctggccatgggtggcggtggcggtgccagctttgaccgtgccatcgagatggagcgtggcaacttcggaggaagcttcgcaggttcctttggtggagctggaggccatgctcctggggtggccaggaaggcctgccagatatttgtgagaaatctgccattcgatttcacatggaagatgctaaaggacaaattcaacgagtgcggccacgtgctgtacgccgacatcaagatggagaatgggaagtccaaggggtgtggtgtggttaag

SEQ ID NO: 348 - DNA, 642 bp, Homo sapiens
  misc_feature 328, 413, 601, 608: n = A,T,C or G
ctatagggcgattgggccctctacatgcatgctcgagcggccgcccttttttttttttttttgaaatataagctttattttaaatttaaagaagtattgaaaataaacattttttacaaattataatcaagcactcaaaacaatttaggaatgttaaacactaattcttaattcaaaataatgacatccatagaatacaaccctggtgttggccaatatgaagtttacttaatattagtattttatatacacttaaccattaatccttcctaaaattcaataacaatgatttcactttataagatgaagccttttatgcaatacccanagataactttttcaaatatgaaacacttataccagtgaggaaattataaaaacatatatcaattatactgaaggacttgatttanaggctgtctgtatatagatgcatttcaccttaggaagtacacatgcacatcaaaacacttcaactgaatatagatgccattacattatttagttacgttacaaagcaaacggcaggttcataaacgttgttctattatgtatcaactgaaaaaaatatattcaaaaaaaaagtttttgaagactcatngggagtnggaatgtgcccacattaggaataaagcttttaca

SEQ ID NO: 349 - DNA, 580 bp, Homo sapiens
cttttttttttttttttactttgacaacaaattatattttaaatgtttcatatttacttttatatttccatacaatcagaaacagtaaaaaaaatttggagagcacataaaaacatcttaaagttaaaaatataaagccttgtatttaaaaatgcagtcatttaaataatattataagaatctatttgtacataataaacaagtttcaaccagcaagaaattactaatattgactgtggagttttggctgttttaatagttctaactcattattccgtaattcaacacagcactaccaacacagctggcaatgacaagactgggagtatcaaactaggattgttagttcaattaaaatttcagataaacaataatgtacttatactaaaaaattatttgttgtttatctgaaatgaaaatttaactgggtacccaattgtttgtttgtttaatctaaaaaccctgattgaaatttatctaataaaacatcatttaatatctaaaataaaataaatttactataacatctttataactattcaatcaatgattcatcttctatttttccaaattcttgcac

SEQ ID NO: 350 - DNA, 617 bp, Homo sapiens
  misc_feature 31: n = A,T,C or G
gactcactatagggcgaattgggccctctanatgcatgctcgagcggccgcgtcgacgtggagacaacaacccagacaagatcccactgtctctttccccagcgtcggtagtcccgtggcatgcgggggcatcagcagccagtgcggggctctgggcctgagtttccagcagctggaggggcgtgagctttggccagtctctgagctcccagggagaagtaactaggtggtctctgagatttcctaacgctgtgtctgggactctgagctcggatgtcacagatagaagtcaggggatctgtgaggctggataggaggaaattactaattttcactaacctttcagcaaagcgtaccatttccttccattatgaacatcagcaacaaacatctgtcatcagaagtcacaggtgttcccatgtcctgccgcaggggtcacgtcacggtagtgacgccatgccagttgtgccgagcaccgctgccgggttcctgcggcgtgacctgctgctgtgtcgtgcaagtcacatagtactacatcacagatccattccttcaataatttgatacgtgtattggattataattgctttctcctacagtcctgtgtattttatgca

SEQ ID NO: 351 - DNA, 648 bp, Homo sapiens
  misc_feature 16, 32: n = A,T,C or G
gactcactatagggcngaattgggccctctanatgcatgctcgagtctttaatataaccccaaatgaaagaaccaaagggaagggtgggatggcacttttttttgttggtcttgttttgttttgttttttggttggttggttcgttattttttaagattagccattctctgctgctatttccctacataatgtcaatttttaaccataattttgacatgattgagatgtacttgaggcttttttgttttaattgagaaaagactttgcaatttttttttaggatgagcctctcctagacttgacctagaatattacatattcctccagtaagtaatactgaagagcaaaagagaggcaggattggggtcacagccgcttcttcagcatggaccaagtgggccttggggattgcagcgttctcgaagtggctgtaggactcgaatttacagaaagccacagaggtgcaacttgaggctctgctagcaagccaccagtgaggctattgggtaaccacctttctatacaggagattggaatctactttgtcatttatccaccacagtgacaaaggaaaagtggtgccgttatgcaattccatttaactcataaacatattactctgagtaactggccagccattcatcgga

SEQ ID NO: 352 - DNA, 682 bp, Homo sapiens
  misc_feature 1, 603, 643: n = A,T,C or G
nactcactatagggcgaattgggccctctacatgcatgctcgagcggccgccctttttttttttttttttagttatagagctaattggcttttatttgtgatttatgaattaaagcagcaccactctacaagtacagtgatagctccccctgggcaatacaatacaagaacagtgggttttgtcaaattggaacaaggaaacagaaccacagaaataaatacattggttaacatcagattagttcaggttacttttttgtaaaagttaaagtagaggggacttctgtattatgctaactcaagtagactggaatctcctgtgttctttttttttttaaattggttttaattttttttaattggatctatcttcttccttaacatttcagttggagtatgtagcatttagcaccactggctcaatgcgctcacctaggtgagagtgtgaccaaatcttaaagcattagtgctattatcagttaccaccatttggggcttttatccttcatgggttatgatgttctcctgatgacacatttctctgagttttgtaattccagccaaagagagaccattcactatttgatggctggctgcatgcanacatttaaagcttttagagaatacactacaccagggagtntgactactagtatgactattaggagggtaataccaagag

SEQ ID NO: 353 - DNA, 276 bp, Homo sapiens
  misc_feature 29, 30, 239, 244, 273: n = A,T,C or G
ttttttttttttttagcatatagaagtgnnaataaatattttgtggcccactatacctgtcaggggtattttatagactaaatagtgtcagttagtctaaatcactcatagacatgtactaggtggttttcctttttcagagattaaataaatcttcccaaggtaaccacggtttaaaatatagtaatccacaaaatatttattatcacttctatatgctaaaaaaaaataaatcgaangttanaaacttaaagaaaaaacaaaatcaagctncat

SEQ ID NO: 354 - DNA, 511 bp, Homo sapiens
  misc_feature 483, 508: n = A,T,C or G
attgggccctctacatgcatgctcgagcaccgtcattaccccgagcacctgcagccccaggaagtcctggccgtcctcgctcaccaggagcccctcttggacccatgggtccaggagctccattttcgcctggaagaccattttcaccctttaatccaggagcacctgtttcacccttttctccatttcgtccatcgaagcctctgtgtcctttcataccagggaatccaggtatcccagctggacctttgatacctggaggtccaggcaatcctcgctctccaggtcgtccgggtctacctgattctccatcttttccagcaggaccagatggacctatagcaccaggaggtcctggagggcctgaaggaccagcttgcccaggttcaccagggggtccttggtatcctggagatccaggggaaccaggatgaccagatgtaccagggggaccgggagggcctggggggccagctggtccangatagcctgcgagtcctcctactgntac

SEQ ID NO: 355 - DNA, 510 bp, Homo sapiens
  misc_feature 199, 264, 382, 383, 435: n = A,T,C or G
ctttttttttttttttttttatagatacaattggcttttatttgtgattcatgagtcagggcagtttccattctgcaaaatatagtgatagctcctactgggcaatacaacagtagaacagtgggttttgtaaaatgggaatccaggaacagaagaatataaataaattgatttaaataaactgattggttaatttcanaatacttcatattacttttttctaagagttaaagcagaaaggactttcttactgtgctgactcanacagcctggactctcatgtttttaggaaaattttgtctgttctgggatctacctgcttcctcatgtttcagtgtgagtatatggcatttagcatgactggctccattctggagtcccnnggctgtcacctaaatgagagtttgactaaacataaggcattaacactactgncagttaccatcattttggacttccatcattcataggttatgatgtcctcctaatcatacatttatttgagttttt

SEQ ID NO: 356 - DNA, 448 bp, Homo sapiens
  misc_feature 12, 250, 277, 405: n = A,T,C or G
tgggccctctanatgcatgctcgagcggccgccctttttttttttttttttttgcagttatttttaaaactttattttaaaaatatgagcatctattttaaaagttttgataattattgccattattttcttgtgattggtacaatttaaaaataagtctatgttttcacattgattttaaaaaatatagcatgtttgaattacaaatgattaagcaaactctattacttcatagctgaccatcttccanaaaattcccacttaattgaatacttanaaaaaaatggccagtggccgattgaaaggtatattaaaattaagggcagttttaattctgaagacaaatatcttcatggaaatctatttgtaagcttctgagattgctgctgaaagtctacagtctgngaatataccaattcccctttacaactgatgcagatcattatga

SEQ ID NO: 357 - DNA, 521 bp, Homo sapiens
  misc_feature 3, 19: n = A,T,C or G
gcngaattgggccctctanatgcatgctcgagcggccgcccttttttttttttttttagttatagagctaattggcttttatttgtgatttatgaattaaagcagcaccactctacaagtacagtgatagctccccctgggcaatacaatacaagaacagtgggttttgtcaaattggaacaaggaaacagaaccacagaaataaatacattggttaacatcagattagttcaggttactttttttgtaaaagttaaagtagaggggacttctgtattatgctaactcaagtagactggaatctcctgtgttcttttttttttttaaattggttttaattttttttaattggatctatcttcttccttaacatttcagttggagtatgtagcatttagcaccactggctcaatgcgctcacctaggtgagagtgtgaccaaatcttaaagcattagtgctattatcagttaccaccatttggggcttttatccttcatgggttatgatgttctcctgatga

SEQ ID NO: 358 - DNA, 370 bp, Homo sapiens
  misc_feature 5, 6, 33: n = A,T,C or G
tatcnnctcctatagggcgattgggccctctanatgcatgctcgagcgaagcagctggctctgtttgcgcaggaagtccacgggggcagccacaccatagctgctcttgcccaaggcagctctcgggggtcccgaggaggcatgcgagtgcgagcccgcttccagctggcccaggtgggccacatagccgtctgacaggaactggcactgcgcctgtagcttccgcacggcacggcccacgatgtaggtctggctcggggacagccccagcgccgcgtatacagccacatctttgggagacccataaccggccacgatgttcagttctacctcctgcaccaggctctgcagaaacattgccttctggcgt

SEQ ID NO: 359 - DNA, 107 bp, Homo sapiens
gcatgctcgagcggccgcgtcgacttttttttttttataagattattagtataaaaggggagataggtaggagtagcgtggtaagggcgatgagtgtggggaggatg

SEQ ID NO: 360 - DNA, 58 bp, Homo sapiens
  misc_feature 22: n = A,T,C or G
tagggcgaattgggccctctanatgcatgctcgagcggccgccctttttttttttttt

SEQ ID NO: 361 - DNA, 506 bp, Homo sapiens
tatacgactcactatagggcgaattgggccctctagatgcatgctcgagccattttttgtatggagggaccagacatgggttagaaaaggccttgttctctttcaacaaggctttgtatgtgaagactgtgatttggaaaagctcatccttccacaaggggttttctctttgatgttctggccctgacttctgaaaccagtgttctggggagaggcatttgagagtgacccagggcctgggaaccggggcttttctcggtggtcttaggcctgttctgcaaccaaggcaaggccaggtaagccgagttggacagagggtgcagttttgctgtcggatctgccaatgctgtttatctcacaaagtcatgcattccttggaacccagctcccatctgctgcccatggatgctctggctgagctgaactgtgtctcatcattttgttatctgtgtcttatagcttttggatggttttatcgttacgatggcaaattcccaaccatccgg

SEQ ID NO: 362 - DNA, 566 bp, Homo sapiens
ctttttttttttttttactttgacaacaaattatattttaaatgtttcatatttacttttatatttccatacaatcagaaacagtaaaaaaaatttggagagcacataaaaacatcttaaagttaaaaatataaagccttgtatttaaaaatgcagtcatttaaataatattataagaatctatttgtacataataaacaagtttcaaccagcaagaaattactaatattgactgtggagttttggctgttttaatagttctaactcattattccgtaattcaacacagcactaccaacacagctggcaatgacaagactgggagtatcaaactaggattgttagttcaattaaaatttcagataaacaataatgtacttatactaaaaaattatttgttgtatatctgaaatgaaaatttaactgggtacccaattgtttgtttgtttaatctaaaaaccctgattgaaatttatctaataaaacatcatttaatatctaaaataaaataaatttactataacatctttataactattcaatcaatgattcatcttctatttttc

SEQ ID NO: 363 - DNA, 644 bp, Homo sapiens
  misc_feature 496, 534, 596, 598: n = A,T,C or G
cttttttttttttttttaggttattaaataatttgtttattgtacggcatttacaaagaaaacagacaatgccctcagtagaaagaataaaaatgtatttagggctttatttttaactgacagcaaatagaaatcctttagtgagatcgtggcaatttgacagtattataattaagctcaataaaggtacatggggtacctggaagatcaagatctacagctgcctatttccacatctttcaatccatctggctccttaaataggggaaaaagcccttatttggtggagaagcatttccaaaatgaagttacaggttctattaaaacttactgtcacatcaactgttaaaatagggccttttgtgttttgttatttcaccttaatatcaccagaattcctgtaattccacaattgtgattttactatgtagaagataattcagttctagtctattgctttagatgtaaaaacagctgaaaacccaaagtggattanaattgctgaaggatttccctgccgttgtttgatacaantctattctcttgattcttgataggtgcatagaaagcctaacttaaaaattctttctacaggnancatgtctgatttcaggagtacccaatgaaggatccgagctcggtac

SEQ ID NO: 364 - DNA, 608 bp, Homo sapiens
  misc_feature 129, 190, 330, 375, 602: n = A,T,C or G
cttttttttttttttttttttttttttttactttgacaacaaattatattttaaatgtttcatatttacttttatatttccatacaatcagaaacagtaaaaaaaatttggagagcacataaaaacatnttaaagttaaaaatataaagccttgtatttaaaaatgcagtcatttaaataatattataanaatctatttgtacataataaacaagtttcaaccagcaagaaattactaatattgactggggagttttggctgttttaatagttctaactcattattccgtaattcaacacagcactaccaacacagctggcaatgacaanactgggagtatcaaactaggattgttagttcaattaaaatttcanataaacaataatgtacttatactaaaaaattatttgttgtttatctgaaatgaaaatttaactgggtacccaattgtttgtttgtttaatctaaaaaccctgattgaaatttatctaataaaacatcatttaatatctaaaataaaataaatttactataacatctttataactattcaatcaatgattcatcttctatttttccaaattcttgcacaaatatttgntgctta

SEQ ID NO: 365 - DNA, 683 bp, Homo sapiens
  misc_feature 510, 585, 598, 612: n = A,T,C or G
tgcatgctcgagcggccgcccttttttttttttttttttaaaatgccatttattggtataaaaaccatttatacattatataaatacaatataaatatttctttaaaaatatgtataagttagccatttatttgaggtaagcctacactttccaagaaatgatctggctctgaaacaaaggatattcaaactgcatagccactttccattattatttcaaaactaatacataaaatgtttcaagtggtacttcttaaaaatataaatatgacttacataaattaactcagcttcacatatttaaatattaataaattaaaataattaaaatagtgtcctaacgctcatacttttagttctccatagagaacaacataagttctgtgcccagtggacaggtttctgaccagaagaaggaatgcccattaacaacaacaatctgaggtgcccatgctacatttgccgaagagccctcaggctggactgcaggaactccttaaagctgcgcanaatgagatgagttgtcatgtcctgcagccactggttctgtgcctgcagcttcgtcagcaggctggcatttgtggntgggtcaggggtngttattgcatctanattctttgcctttttctgcaggaactggatcaggacttttgtactcatctgcacagctctggcttggtcct

SEQ ID NO: 366 - DNA, 598 bp, Homo sapiens
  misc_feature 129, 190, 340, 375, 420: n = A,T,C or G
cttttttttttttttttttttttttttttactttgacaacaaattatattttaaatgtttcatatttacttttatatttccatacaatcagaaacagtaaaaaaaatttggagagcacataaaaacatnttaaagttaaaaatataaagccttgtatttaaaaatgcagtcatttaaataatattataanaatctatttgtacataataaacaagtttcaaccagcaagaaattactaatattgactggggagttttggctgttttaatagttctaactcattattccgtaattcaacacagcactaccaacacagctggcaatgacaagactgggagtntcaaactaggattgttagttcaattaaaatttcanataaacaataatgtacttatactaaaaaattatttgttgtttatntgaaatgaaaatttaactgggtacccaattgtttgtttgtttaatctaaaaaccctgattgaaatttatctaataaaacatcatttaatatctaaaataaaataaatttactataacatctttataactattcaatcaatgattcatcttctatttttccaaattcttgcacaaatat

SEQ ID NO: 367 - DNA, 476 bp, Homo sapiens
  misc_feature 214, 241: n = A,T,C or G
cttttttttttttttttgcagttatttttaaaactttattttaaaaatatgagcatctattttaaaagttttgataattattgccattattttcttgtgattggtacaatttaaaaataagtctatgttttcacattgattttaaaaaatatagcatgtttgaattacaaatgattaagcaaactctattacttcatagctgaccatcttccanaaaattcccacttaattgaatacttanaaaaaaatggccagtggccgattgaaaggtatattaaaattaagggcagttttaattctgaagacaaatatcttcatggaaatctatttgtaagcttctgagattgctgctgaaagtctacagtctgtgaatataccaattcccctttacaactgatgcagatcattatgaaatactggaaggcataccctacaatttaggaattggtgtggctgccactgctatgctctcaatt

SEQ ID NO: 368 - DNA, 618 bp, Homo sapiens
  misc_feature 87, 618: n = A,T,C or G
tacgactaactatagggcgaattgggccctctagatgcatgctcgagatgatagtcaactaaatggagattctagtgctttgcttantcccagtaaggaatgtgaaccttatcgaagaaatgaagacaaaccaattgctccttgtggagctattgccaacagcatgtttaatgatacattagaattgtttctcattggcaatgattcttatcctatacctatcgctttgaaaaagaaaggtattgcttggtggacagataaaaatgtgaaattcagaaatccccctggaggagacaacctggaagaacgatttaaaggtacaacaaagcctgtgaactggcttaaaccagtttacatgctggattctgacccagataataatggattcataaatgaggattttattgtttggatgcgtactgcagcattacctacttttcgcaagttgtatcgtcttatagaaaggaaaagtgatttacatccaacattaccagctggccgatactctttgaatgtcacatacaattaccctgtacattattttgatggacgaaaacggatgatcttgagcactatttcatggatgggaggaaaaaatccatttttggggattgcttn

SEQ ID NO: 369 - DNA, 513 bp, Homo sapiens
tatacgactcactatagggcgaattgggccctctacatgcatgctcgagtcattgcatactgtccatcaatatcagctacttgttcttgagtgaaggactgagaaaatccctgttcccactcatacaggacttgggaggtatccacatcctcttcctcaggattgcctttaccactcagagaaggagctgtggtagtggcaccagaatggattccagagtccaggtaagactgttgctgccagtgactaacagccgcttttctgtctggttccatggccatgtccaactccatcaaatcagcttgagtagccattgtccacgctggattttcaaaacagttgtatggtatacttcaaataccctcaggggaacaggctcctcccgccgcgggagtccgaccgtcctcgacctgcggtggcggctcggcggggactgaagctgctcctcagaccttcctccgtctccgcctcccctcgctctccgctcccggggccgggccaacgctgctggtc

SEQ ID NO: 370 - DNA, 573 bp, Homo sapiens
  misc_feature 32, 79, 178, 190, 394, 472: n = A,T,C or G
gactcactataggggcgaattgggccctctanatgcatgctcgagcggccgcccttttttttttttttttactctaaanatactttttatttaaatattttatgatgatacatatacaaatataatcttccaaaaaacaaatgtaaaactaatacaaatcactttttcaggaacaaanaaaatcatttanaaaatgtgattatgctaaaagaggcaggttaggtttccaaggctgctcaaggtggaagcttaagaccaacttttgtttgagtacacaagtgatatttacattttcatatactagtgatatgcctgttgcatacttggcaaaataaaactgatagtaagtctataataataaaagaaacaacaattactaagtaaacaattctanatgatggaagagtaacctccatttaagctacagacttaaatgtctaaaaatatgtgtcctgatctgtacacagttagngggagcacactatataaatcctttgcatgacaccattcaacaatattttttaaaatctacaaaattttaaagtttcacttccctagcaaaatatcttcagt

SEQ ID NO: 371 - DNA, 419 bp, Homo sapiens
  misc_feature 160, 167, 280, 406, 411: n = A,T,C or G
atgcatgctcgagcggccgccctttttttttttttttttttttttttggctctagagggggtagagggggtgctatagggtaaatacgggccctatttcaaagatttttaggggaattaattctaggacgatgggcatgaaactgtggtttgctccacanatttcanagcattgaccgtagtatacccccggtcgtgtagcggtgaaagtggtttggtttaaacgtccgggaattgcatctgtttttaagcctaatgtggggacagctcatgagtgcaanacgtcttgtgatgtaattattatacgaatgggggcttcaatcgggagtactactcgattgtcaacgtcaaggagtcgcaggtcgcctggttctaggaataatgggggaagtatgtaggagttgaanattantccgccgt

SEQ ID NO: 372 - DNA, 520 bp, Homo sapiens
  misc_feature 3, 4: n = A,T,C or G
tanncgactcactatagggcgaattgggccctctagatgcatgctcgagctcctggtctcaagcctcttgcctcagcctccctagtagctgagactataaatagtatatacagtgccactgtaccctctatcctacatttttaaaagctcaccattaaatagtactaattattatagaaaatagtcacagacaattatgaacacactactgtttcatcttacctctttgtctggtccactcccccatcaatactcagtcttccaacacatatatcaattagaatattttgcatctgcataatttactgcaagaaaatctgctgttgtggactttaagaagaatgtacactatccattagagtggaaaggggccaagaggattaataagtgccaccaagtttctaaaactgcagaatcagaggcattgtgcatgctgacaatggtttaaagggtctctcaattttactttaatcccccatttaacctttgtttctttcaaaaaatcaacgtcgacgcggcc

SEQ ID NO: 373 - DNA, 518 bp, Homo sapiens
  misc_feature 192, 483: n = A,T,C or G
cttttttttttttttttggctctagagggggtagagggggtgctatagggtaaatacgggccctatttcaaagatttttaggggaattaattctaggacgatgggcatgaaactgtggtttgctccacagatttcagagcattgaccgtagtatacccccggtcgtgtagcggtgaaagtggtttggtttanacgtccgggaattgcatctgtttttaagcctaatgtggggacagctcatgagtgcaagacgtcttgtgatgtaattattatacgaatgggggcttcaatcgggagtactactcgattgtcaacgtcaaggagtcgcaggtcgcctggttctaggaataatgggggaagtatgtaggagttgaagattagtccgccgtagtcggtgtactcgtaggttcagtaccattggtggccaattgatttgatggtaagggagggatcgttgacctcgtctgttatgtaaaggatgcntagggatgggagggcgatgaggactaggatgatgg

SEQ ID NO: 374 - DNA, 583 bp, Homo sapiens
  misc_feature 492: n = A,T,C or G
attgggccctctacatgcatgctcgagcaccgtcattaccccgagcacctgcagccccaggaagtcctggccgtcctcgctcaccaggagcccctcttggacccatgggtccaggagctccattttcgcctggaagaccattttcaccctttaatccaggagcacctgtttcacccttttctccatttcgtccatcgaagcctctgtgtcctttcataccagggaatccaggtatcccagctggacctttgatacctggaggtccaggcaatcctcgctctccaggtcgtccgggtctacctgattctccatcttttccagcaggaccagatggacctatagcaccaggaggtcctggagggcctgaaggaccagcttgcccaggttcaccagggggtccttggtatcctggagatccaggggaaccaggatgaccagatgtaccagggggaccgggagggcctggggggccagctggtccaggatagcctncgagtcctcctactgctactccagacttgacatcatatgaatcatactggggagaatagttctgaggaccagtagggcatgattcacagat

SEQ ID NO: 375 - DNA, 641 bp, Homo sapiens
tacgactcactatagggcgaattgggccctctagatgcatgctcgagaggacaaaaacccacaccggacatagatcacaaaacttcctagaactctcctttaaatcggaagaaatttgtaaaatgtgatatgaaatacaactctacaaacatccaaaatacatttctggtcataattaatcgtatttgacattttcctctaagtttaatgcaactttaaataatttaggctttttcctaacatgatagatttttttcagtatcagaaatggacaagaggaaactccagtaaagagaaaagcaatgaatttaaaagggtgcagaatctgaaaacaaactaaccacaatgtacatttaattgtacttaattgtatatttcatttaaatagtccttctcaggggtttaataatttagaatcaatagttcccttcaaaacataataaaatatttacactttataaaatattaaccgattaacaatacagccgtgttgtttataagagtgtaactgaagtcctgcaaatcatgctgttgacacaagcctgtgaggttagcgaagtgatccttagcaaaatgtaaatgaagatcttcagacagtggtgtttataaaatagctcattaatgacttaggattgaatcgc

SEQ ID NO: 376 - DNA, 450 bp, Homo sapiens
  misc_feature 8, 96, 260: n = A,T,C or G
ccctctanatgcatgctcgagcggccgccctttttttttttttttttgaagaagaaaatcctttattttttgatgagcaaaaataataaattgctngttcacactggataagaccatatcaaaagtgacagtaaacatgtacactgttggtgttatatggggatcgggttctcggtaattttgtttattatttatgtttattattatgttttatcattaattattcaataaatttttatttaaaaagtcaccctacttanaaatcttctgtgggggtgggagggacaaaagattacaaaccaaaactcaggagatggtaacactggaattgataaaatcacctgggattagttgtataactctgaaccaccaaacctctgctatcaagccttgctacagtcatggctgtccagaaagatttacagttatttttctgaaaaggatccgagc

SEQ ID NO: 377 - DNA, 391 bp, Homo sapiens
  misc_feature 266, 391: n = A,T,C or G
gcatgctcgagcggccgcccttttttttttttttttatatttttttattttgttttctagtttatgttttatgctatttttattccatactcctccgaaattctatttttaactttattatttttattttttcatctatattctactttttctttacctcgaattcttctttcgtattcctttttaattggttaattctcagtacgaattcttattattatataaattttttatatttttttatatcacttatgtttttcttttanattatttgctttcattctctgttatttatttttattaatttaaatttaatagcaaatttttttttgaaaactttgttctcattagttatttctttttaatttatttcttttatcttcatttttgn

SEQ ID NO: 378 - DNA, 491 bp, Homo sapiens
  misc_feature 439, 468, 479, 485: n = A,T,C or G
ctttttttttttttttatctcaagagaattctaattttatattttcatttaacctttcagtgtttctgtagaattaacatttcctatttcacttcttggttcacagttttcaagagtgctatttaaggaaactaggacaatattcacagcattattctttgataactgctacttacaagacacaaaaaagaatcagtagaggacaaaggtttattcccaactgaatgaaattcagctcgacacccacaacttcattacatatgaaattaacttcattatttgatttgtcctaggtaaaatgcacatatttaatgcctacatctccagttaatgtccaagtgtgcagggattattacctgtcccagacataaaatcctccactattgattttaaagtgagaggattaaactgtagcatatgtatgaactgcttcacttgngatttaaaaaacccaaaacctgcttagtnaaatggggtanatgaanaatgta

SEQ ID NO: 379 - DNA, 471 bp, Homo sapiens
  misc_feature 54, 160, 233, 414: n = A,T,C or G
cgatgcatgctcgagcggccgcccttttttttttttttttggctctagaggggntagagggggtgctatagggtaaatacgggccctatttcaaagatttttaggggaattaattctaggacgatgggcatgaaactgtggtttgctccacagatttcanagcattgaccgtagtatacccccggtcgtgtagcggtgaaagtggtttggtttagacgtccgggaattgcatntgtttttaagcctaatgtggggacagctcatgagtgcaagacgtcttgtgatgtaattattatacgaatgggggcttcaatcgggagtactactcgattgtcaacgtcaaggagtcgcaggtcgcctggttctaggaataatgggggaagtatgtaggagttgaagattaatccgccgtantcggtgtactcgtaggttcagtaccattggtggccaattgatttgatggtaagggag

SEQ ID NO: 380 - DNA, 73 bp, Homo sapiens
  misc_feature 24: n = A,T,C or G
tatagggcgaattgggccctctanatgcatgctcgagcggccgcccttttttttttttttttttttttttttt

SEQ ID NO: 381 - DNA, 587 bp, Homo sapiens
actatagggcgaattgggccctctacatgcatgctcgagtggtattatgaggcctcaggtgccttggggtacattgtcatgctataagggatgtatatcataaggtatggtggaagaggggccttatgtgaatgattgccacatactgtttctgttgctgctttttttccgattcctttttgtcattggatttgtttgttttgtcatgtggtgaatggtgttttagttattgtgttgctgccagaatcagaatccagttcttgttcttactgccttatagttattgtgttgccaccagaatcagaatccagttcttgttcatactgccttgtagtgagggcagtttaatatctacaaagaagcttttagaagctgaaaaagtcaatgtgattgtgcattctgcttttaagaagctgtttcagctatgaactgtgtatgtgctataagtgtgaggtaccataagttatttaatttttaaaagaggaaactcctgagtgagctgtttaagaaatctgagtgtgatctattgttacgttatttataactaggtaaaatgtctgtcgtgatagatttcttttaacgttcag

SEQ ID NO: 382 - DNA, 489 bp, Homo sapiens
  misc_feature 12, 51, 84, 86, 125, 131, 214, 257, 289, 333, 442, 468, 475: n = A,T,C or G
tgggccctctanatgcatgctcgagcggccgcccttttttttttttttttnaagtatcacaatgtttattgatagatacaagtntntaaaatcagggcatgaacatgacttgataaattaagtanacttantttcaatactataataggagggaccaattcaaattctcaccatttgtttcacacccacaaaaaccacttcaagggcattaacnatctctcaaaactgatcagttttgtgcaagtaaaccatgtttnttttaaaaagacttgtgcacttgcccaggctnaaggatattaaaatctagcacataaagcccattactagaggtanaaatacaggcaatatactattacggcaacaaccatcaattacagttaaaaatttttctgtaacaaccaaatggataatcaaatattgcaacaactcaagtattactgancaaagtgcatttctacagtattcagngttgctnttcagttttctaac

SEQ ID NO: 383 - DNA, 436 bp, Homo sapiens
  misc_feature 21, 26, 334, 432: n = A,T,C or G
tagggcgattgggccctctanatgcntgctcgagcggccgccctttttttttttttttttaaccctgttcttgggtgggtgtgggtataatactaagttgagatgatatcatttacgggggaaggcgctttgtgaagtaggccttatttctcttgtcctttcgtacagggaggaatttgaagtagatagaaaccgacctggattactccggtctgaactcagatcacgtaggactttaatcgttgaacaaacgaacctttaatagcggctgcaccatcgggatgtcctgatccaacatcgaggtcgtaaaccctattgttgatatggactctanaataggattgcgctgttatccctagggtaacttgttccgttggtcaagttattggatcaattgagtatagtagttcgctttgactggtgaagtcttancatg

SEQ ID NO: 384 - DNA, 593 bp, Homo sapiens
  misc_feature 34: n = A,T,C or G
tacgactcactatagggcgaattgggccctctanatgcatgctcgagaagtaattatcagttggtttggatttttggaccaccgttcagtcattttgggttgccgtgctcccaaaacattttaaatgaaagtattggcattcaaaaagacagcagacaaaatgaaagaaaatgagagcagaaagtaagcatttccagcctatctaatttctttagttttctatttgcctccagtgcagtccatttcctaatgtataccagcctactgtactatttaaaatgctcaatttcagcaccgatggccatgtaaataagatgatttaatgttgattttaatcctgtatataaaataaaaagtcacaatgagtttgggcatatttaatgatgattatggagccttagaggtctttaatcattggttcggctgcttttatgtagtttaggctggaaatggtttcacttgctctttgactgtcagcaagactgaagatggcttttcctggacagctagaaaacacaaaatcttgtaggtcattgcacctatctcagccataggtgcagtttgcttctacatgatgctaaaggctgcgaatg

SEQ ID NO: 385 - DNA, 88 bp, Homo sapiens
  misc_feature 13: n = A,T,C or G
gcatgctcgagcngccgcccttttttttttttttttttactttgacaacaaattatattttaaatgtttcatatttacttttatattt

SEQ ID NO: 386 - DNA, 412 bp, Homo sapiens
  misc_feature 26, 27: n = A,T,C or G
cactatagggcgaattgggccctctnnatgcatgctcgaggaagttttgcacctggagaggccgccgagaggatggagctgggcccggggaggccgacttgcagctcttccaggcccatttccaggccgacttgaggacgacttaggcctgcagaggccgccgggaggctggagctgggcctggagaggccgacttcaggacgatttgggcctgcagaggctgccgggaggcaagagcggggcctgcagaggctgttctccagccagagctgggcctgcacaggccaccgggaggcaggaggtgggcccgaagagcttggctggagaaagttcggggcccacaaaggcggttgggagctgggcaggagccaagccaaaaaagcttgcttacttgctgggaggcagggccggg

SEQ ID NO: 387 - DNA, 585 bp, Homo sapiens
  misc_feature 479, 480, 482, 536, 537: n = A,T,C or G
gccctctagatgcatgctcgagcggccgcgtcgactttttttttttttttttgagttttaatgttggttatgtcaatttattagtaattttggtcttcccattagtgtcctgtataaaaatgatgagtttctccgtagtacgtacaacagcttttaaagagaacgtaggcagaataattcagacagaaaccataaataaccagaaggcaaagtgaagcaaaattgtctcatgtgatgtttatcccaatttatatcgatattcttctatcaatttttagactgttaaagtaaaatcttaatctaagtgtcttatgaatcattataaaagattccaacctttaaaaattatgaaaggtttaaagacctcattaatagagttagaaatgtttgctattatcctactggtcaactttggtctgtattttctgcacctcttcaggccaagaataacaatcaggtagaatctggtcataatcagnncnatacatctgggagcggacaaatgcttctttgttttgcggttcaggataaactgnngctgtcttttcttggtatgcatctttcacaatcttttctgcaattttc

SEQ ID NO: 388 - DNA, 582 bp, Homo sapiens
  misc_feature 8, 9: n = A,T,C or G
gccctctnnatgcatgctcgagtcggccagctggatctcccacaaggtttccttgttaaaagggtgcttaagtaacctggccggcagcacgacttatgatgaagcacgaagaagccaggttctgtgtcgatcactctctcagtcccctcaactgctcatcttaaactatttggttcctgacacgtttccaaaaggggaaaggggaaaaggggaaggggggaaggggaacataaaaagtatttgttacatttaaaaagggggggaaggggaaagagctgtatctatgttcacctcattcaacttccttgagttatggcactatgatgttgcttaattaggtaagacatggatatttgcaccgagtgcaaatactgttcataacaaggtcatagctagaaagacagatgggctcaagtgtggacaaataatgtcatcaaggtaatagatcaaaaatattaaagccctataaaagatctgagcagtcaactccaaaacatccacatgacaaagtccttaaaatacaaatctcattactcttactcatgcaactgctaaaaaatagtgtgcagatatgtatttata

SEQ ID NO: 389 - DNA, 417 bp, Homo sapiens
  misc_feature 2: n = A,T,C or G
cnactcactatagggcgaattgggccctctagatgcatgctcgagctcatcagaagaaccttctcatgcctctcgacgactgtgtgatgtggacatagactacagaccttatctctgtaaggcatggcagcaactggtgaagcacaggatgtttttctccaaacaagatgattctcaaagcagcaaccaattttcattagtttcacgttgtttaaaaagtaacagtttaaaaaaacatttttttattattggagaaagtggggttgaattttgttgatatacatcataaaatagtcttttgcagggtactacgcaagccttaaaatttttcttaagacagagtcttgctctgtctcccaggctggagtgcagtggcacaatcatggctcactgcagccttgaactcctggcctcaag

SEQ ID NO: 390 - DNA, 585 bp, Homo sapiens
cactatagggcgaattgggccctctagatgcatgctcgagtcgtcatggctctgctcggccttccatctcttgtacctgtcgatgagctcggtcaagtaggaagttttctttgcattgcgtagtataaacttgtgcttcaataactccttagcagtgggtctaaagctcggctccttattcaaacaggcctccacaaactccttgaggggtttactgtagtttccttccaacgtcggtgggttgttctttggaatgaggaataaaactttcatggggtgcagctcggaatgaggtggttcccctcttgcaagttcaatagctgttatgcccagggaccagatgtctgccttcgagtcataggccgactgtttgatgacctcgggtgccatccagaatggggtgcccacgaaggtgttccttttgatctgggtgtctgtcagctggccagccacgccaaagtccgccagcttcacctcgccatgctcagacagcaggacgttggccgctttaatgtctctgtggattttcttctccgaatggagataatcgagtcctttcagtatttctcttaatatagtagcgat

SEQ ID NO: 391 - DNA, 587 bp, Homo sapiens
  misc_feature 26: n = A,T,C or G
cactatagggcgaattgggccctctngatgcatgctcgagcggccgccctttttttttttttttactttgacaacaaattatattttaaatgtttcatatttacttttatatttccatacaatcagaaacagtaaaaaaaatttggagagcacataaaaacatcttaaagttaaaaatataaagccttgtatttaaaaatgcagtcatttaaataatattataagaatctatttgtacataataaacaagtttcaaccagcaagaaattactaatattgactgtggagttttggctgttttaatagttctaactcattattccgtaattcaacacagcactaccaacacagctggcaatgacaagactgggagtatcaaactaggattgttagttcaattaaaatttcagataaacaataatgtacttatactaaaaaattatttgttgtttatctgaaatgaaaatttaactgggtacccaattgtttgtttgtttaatctaaaaaccctgattgaaatttatctaataaaacatcatttaatatctaaaataaaataaatttactataacatctttataactatt

SEQ ID NO: 392 - DNA, 248 bp, Homo sapiens
gacgcccgccgcagctggggcgatccacgggaagggcccggctcgcgtccagagtcgccgccgccgccggccccccgggtgcccgggcccccctcgcgggggaccgtgcccccgccgccggggccccgcggcgggccgccgccggcccctgccgccccgacccttctccccccgccgccgcccccacgcggcgctcccccggggaggggggaggacggggagcgggggagagagagagagagagggcg

SEQ ID NO: 393 - DNA, 576 bp, Homo sapiens
ctatagggcgaattgggccctctagatgcatgctcgaggtggtggcagggccgccccctgcagtccggagacgaacgcacggaccgggcctccggaggcaggttcggctggaaggaaccgctctcgcttcgtcctacacttgcgcaaatgtctccgagcttactcacatagcatattggtatatcaaaatgaaatgcaaggaaccaaaaataacataattgaaggcagtaaaagtgaaattaaataggaagatcatcagtcaaggaagacccactggagaggacagaaaatgaagcagtgttttatcatgtgtatttcagcaggtcttcttgaaatttaactaaaaatatgactgctctctcttcagagaactgctcttttcagtaccagttacgtcaaacaaaccagcccctagatgttaactatctgctattcttgatcatacttgggaaaatattattaaatatccttacactaggaatgagaagaaaaaacacctgtcaaaattttatggaatatttttgcatttcactagcattcgttgatcttttacttttggtaaacatttccattata

SEQ ID NO: 394 - DNA, 654 bp, Homo sapiens
  misc_feature 29, 30: n = A,T,C or G
actcactatagggcgaattgggccctctnnatgcatgctcgagcggccgcgtgcatgtgcagaacactcaaatgtactgaagggatcagaactgtattttccttaagtctttccagcagtccctatcagaaaccaagggaagaaacttggaatttttattccataggccatccatgaagaatcaacaaggtttgctgaccttctttcatgtaaacagtgcttaccacaacataaacaggcactgtggggtgatgagcccaattttctccctccaaactcaagaaggtatcagaagagtgtaagaaaatccttacaccctttcaacagctgcttaggaacggctttagatggcagcagtctgtggctttgttagtgtggagaaggacactgagggagaggcaggaggcagagaagtttaacgctactgcactaggagtgatcttcagcccatggaagacaagaaagaggagggctcaggattttcagcacagtgttggacctttcttatgttaaacttccaaaaaaacttcattggtacatgtagtaccaattcattggtacatgtagtaccaattcattggtacatgtattggtacatgtattggtacatgtagtacaaattcattggtacacataggctcttagttacttaga

SEQ ID NO: 395 - DNA, 594 bp, Homo sapiens
tatacgactcactatagggcgaattgggccctctagatgcatgctcgagaagtaattatcagttggtttggatttttggaccaccgttcagtcattttgggttgccgtgctcccaaaacattttaaatgaaagtattggcattcaaaaagacagcagacaaaatgaaagaaaatgagagcagaaagtaagcatttccagcctatctaatttctttagttttctatttgcctccagtgcagtccatttcctaatgtataccagcctactgtactatttaaaatgctcaatttcagcaccgatggccatgtaaataagatgatttaatgttgattttaatcctgtatataaaataaaaagtcacaatgagtttgggcatatttaatgatgattatggagccttagaggtctttaatcattggttcggctgcttttatgtagtttaggctggaaatggtttcacttgctctttgactgtcagcaagactgaagatggctttcctggacagctagaaaacacaaaatcttgtaggtcattgcacctatctcagccataggtgcagtttgcttctacatgatgctaaaggctgcgaatg

SEQ ID NO: 396 - DNA, 563 bp, Homo sapiens
  misc_feature 35, 131, 145, 194, 292, 345, 349, 477, 480, 487, 533: n = A,T,C or G
ctttttttttttttttttttttttttttattttanatatttttatttctccaaatttgttatttatcaggagtgactgaaataaaaaatacaattgagtcccatcatcatcatcatggaaatggctttaanagaaaactggtcanatgaatattattgcttcccattttcaaccagtaaatagttgccactganaaactgacagccaggagtctgtcaagaatgctcaagatatgttatataatacaacatgcctgttcacagggggaaaaatcctaggaaataacttatgngtacttcttgatttcatcatacaagacaagcacaaaagcaccacccatgcctntganaacattggaccatgcacccttgaaaaaagctttgcctccttcatcacgagcaatcttccgccagcagtcaagcgtgcctgtgtacatgatgtcagttcctttgcgccctgactgcatcatcatgcggnggngaacggngtcaaatggataggaagtcaacccggcaacagcagtgacagtctgngcgatcatccagctgatgaccatgtgagtg

SEQ ID NO: 397 - DNA, 346 bp, Homo sapiens
ctatagggcgaattgggccctctagatgcatgctcgaggttatggaacagcacatttctagaggaatattccaaactgaactacttggacattctcatgcgagccttcattgatgtgactgctgctgccgaaaatatcaggctgccaaatgcaggcactcaggttcgagtgactgtgtttccctcaaagactgtagctcagtattcgggagtaccttggtggatcatcctagtggctattctcgctgggatcttgatgcttgctttattagtgtttatactatggaagtgtggattctttaaacgctctaggtacgatgacagtgttccccgataccatgctgtaa

SEQ ID NO: 398 - DNA, 608 bp, Homo sapiens
  misc_feature 550, 567: n = A,T,C or G
gtcgactttttttttttttttttagagctaattggcttttatttgtgatttatgaattaaagcagcaccactctacaagtacagtgatagctccccctgggcaatacaatacaagaacagtgggttttgtcaaattggaacaaggaaacagaaccacagaaataaatacattggttaacatcagattagttcaggttacttttttgtaaaagttaaagtagaggggacttctgtattatgctaactcaagtagactggaatctcctgtgttctttttttttttaaattggttttaattttttttaattggatctatcttcttccttaacatttcagttggagtatgtagcatttagcaccactggctcaatgcgctcacctaggtgagagtgtgaccaaatcttaaagcattagtgctattatcagttaccaccatttggggcttttatccttcatgggttatgatgttctcctgatgacacatttctctgagttttgtaattccagccaaagagagaccattcactatttgatggctggctgcatgcanacatttaaagcttttanagaatacactacaccagggagtatgactactagtatgacta

SEQ ID NO: 399 - DNA, 580 bp, Homo sapiens
  misc_feature 138, 155, 173, 330, 375, 500, 508, 510, 512, 520: n = A,T,C or G
ctatagggcgaattgggccctctagatgcatgctcgagcggccgcccttttttttttttttttttttttttttttgccatttgctatgttttattttgctagtagcttattaaacataacatgcaaataatcaaaganaaacatacatgacttanagtgaaaaataattctanaaaagtttcactaggtaagtatgcaaattcttattctaaaaatacttctttaagtgcatgaagcttcatgtattttgcaatattcttggcctcaatatctaccacctattttttaaccagacaaatttgaatgtatcaagataatttggtgcaaganagtaacatccatatgtatttaatccaagctttgaggaacattaanatttaaggattataaaacttggctgatttccatgcaaccagtaaaaggttttgcacatcatttgacagtagaaataaaaaaacactaaatttacaaataaagcattgagtttgatgtctattcgngtatatgngngngttcttgngatgaaataggcctgcctttcatcttttctttaaaaaaaataaatgtttacaaaacattt

SEQ ID NO: 400 - DNA, 594 bp, Homo sapiens
  misc_feature 488: n = A,T,C or G
ctatagggcgaattgggccctctagatgcatgctcgagcaccgtcattaccccgagcacctgcagccccaggaagtcctggccgtcctcgctcaccaggagcccctcttggacccatgggtccaggagctccattttcgcctggaagaccattttcaccctttaatccaggagcacctgtttcacccttttctccatttcgtccatcgaagcctctgtgtcctttcataccagggaatccaggtatcccagctggacctttgatacctggaggtccaggcaatcctcgctctccaggtcgtccgggtctacctgattctccatcttttccagcaggaccagatggacctatagcaccaggaggtcctggagggcctgaaggaccagcttgcccaggttcaccagggggtccttggtatcctggagatccaggggaaccaggatgaccagatgtaccagggggaccgggagggcctggggggccagctngtccaggatagcctgcgagtcctcctactgctactccagacttgacatcatatgaatcatactggggagaatagttctgaggaccagtagggcatgattcacagat

SEQ ID NO: 401 - DNA, 643 bp, Homo sapiens
  misc_feature 470, 533, 595: n = A,T,C or G
tgggccctctagatgcatgctcgagcggccgcccttttttttttttttttttttaggttattaaataatttgtttattgtacggcatttacaaagaaaacagacaatgccctcagtagaaagaataaaaatgtatttagggctttatttttaactgacagcaaatagaaatcctttagtgagatcgtggcaatttgacagtattataattaagctcaataaaggtacatggggtacctggaagatcaagatctacagctgcctatttccacatctttcaatccatctggctccttaaataggggaaaaagcccttatttggtggagaagcatttccaaaatgaagttacaggttctattaaaacttactgtcacatcaactgttaaaatagggccttttgtgttttgttatttcaccttaatatcaccagaattcctgtaattccacaattgtgattttactatgtagangataattcagttctagtctattgctttagatgtaaaaacagctgaaaacccaaagtggattanaattgctgaaggatttccctgccgttgtttgatacaatctattctcttgattcttgataggngcatagaaagcctaacttaaaattctttctacaggaacatgtctgatt

SEQ ID NO: 402 - DNA, 729 bp, Homo sapiens
tacgactcactatagggcgaattgggccctctagatgcatgctcgagcagttaccaaggaccactttactgcgatcaggattccaacgaccacctaatttcgtatctttcaactcttttcgaccggacctcttattcggaagcgttacaggaagacaggtctcaacttagggatcagatcacgttatcaacgctctgggatcgctgcaacctggcacttcaaggaagtgcaccgataacgtctagaccggcaaacacagatctagaggtggccaactgatcactgtaggagctgactggcaaagtcaaccaggcccaaccaagagtgaccaagacaacgattaggataacccacaggcactcctcgtcataaggccaacgacacagacaggctggcaaataaagggtttaatatttggttaaaaattgattttaaaaaacaagaaaaatatcctcaaaacatttacatttgatcactaatattaaagttcaaaatatcccccaaattacatttaattaaatgtttaaaattacaattccattaaatccattaatttaaaactacttttaataaaacaatacaacattagctacccattaacttttttaaaaagccacatcaaaataactcaaaactgtatttcaacaaacctgccagctgactcttgaggataaattctcaactataagacgattttctgttcttacaggtggagcatttcgtctatca

SEQ ID NO: 403 - DNA, 411 bp, Homo sapiens
  misc_feature 205, 314: n = A,T,C or G
agggcgaattgggccctctagatgcatgctcgagcggccgccctttttttttttttttttttttttaagatgcaagtacaaggtaagtatagagaaaaaattaatcgcttttttgagggggctagaactagctgggtattgtaatgttattgcgattaaaatagatggtgaatgctaattcttaagccaaaataattatttcggngcccatttattccccccttttcttgctctgtagcggttcctctttgagagcagtgtgaccactatccccagttgtcttgcatgattaattacagcatctgtcctgtcanaagctataatgaagaggtcttgataaaaattgcaaattaccactggcaacagtcttaaactgcttatgataaaatgaaaattaaaaacagcaagtgt

SEQ ID NO: 404 - DNA, 620 bp, Homo sapiens
ctataggggcgaattgggccctctagatgcatgctcgagcggccgccctttttttttttttttgcctcaaactattttttatttgcaactacatgatttcacacaattctcttaaacaacgacataaaatagatttccttgtatataaataacttacatacgctccataaagtaaattctcaaaggtgctagaacaaatcgtccacttctacagtgttctcgtatccaacagagttgatgcacaatatataaatactcaagtccaatattaaaaacttaggcacttgactaactttaataaaatttctcaaactatatcaatatctaaagtgcatatattttttaagaaagattattctcaataacttctataaaaataagtttgatggtttggcccatctaacttcactactattagtaagaacttttaacttttaatgtgtagtaaggtttattctacctttttctcaacatgacaccaacacaatcaaaaacgaagttagtgaggtgctaacatgtgaggattaatccagtgattccggtcacaatgcattccaggaggaggtacccatgtcactggaattgggcgatatggtttattttttcttccctgatttgga

SEQ ID NO: 405 - DNA, 582 bp, Homo sapiens
  misc_feature 4, 551: n = A,T,C or G
gacncactatagggcgaattgggccctctagatgcatgctcgagtggtattatgaggcctcaggtgccttggggtacattgtcatgctataagggatgtatatcataaggtatggtggaagaggggccttatgtgaatgattgccacatactgtttctgttgctgctttttttccgattcctttttgtcattggatttgtttgttttgtcatgtggtgaatggtgttttagttattgtgttgctgccagaatcagaatccagttcttgttcttactgccttatagttattgtgttgccaccagaatcagaatccagttcttgttcatactgccttgtagtgagggcagtttaatatctacaaagaagcttttagaagctgaaaaagtcaatgtgattgtgcattctgcttttaagaagctgtttcagctatgaactgtgtatgtgctataagtgtgaggtaccataagttatttaatttttaaaagaggaaactcctgagtgagctgtttaagaaatctgagtgtgatctattgttacgttatttataacnaggtaaaatgtctgtcgtgatagatttcttt

SEQ ID NO: 406 - DNA, 600 bp, Homo sapiens
ctatagggcgaattgggccctctagatgcatgctcgagagagctacctttttccttttatgtataaggacacagctagaaaatgccatgtatgatccagaggcctaatttgttgatcccttaatcttggacttcccaccattgagaacagcgagaaataaatttctgttgtttataagctgccaagttcatagtatttcattacagcagcctgcacagaccaaggcagtatttttttttaatgtcttctaagggaacccccccaaaagtaaacaaaaatctacaaaagttatttgtatgatcaaaatcaaaacattcttattcacgaaatagaagctacagtaaattttcaaaaaataagagttaaaaaactccccccatatgatatattttacagtttcacaagggtaccaggtcgtgaaggaattttattaaatctattaaatcatagatagcttttaataagttcaattttactttaagagctaataagttacttgatattaacctttttacttataaggtaagtgggagatatgacatcataatcttagacatttaaaaaatcctgagaaagattatttcaatcttttacagtttg

SEQ ID NO: 407 - DNA, 529 bp, Homo sapiens
gccaactcacacaaggcaggtgagtgaggaaatccagagttgccatggagaaaaatccagtgtcagcattcttgctccttgtggccctctcctacactctggccagagataccacagtcaaacctggagccaaaaaggacacaaaggactctcgacccaaactgccccagaccctctccagaggttggggtgaccaactcatctggactcagacatatgaagaagctctatataaatccaagacaagcaacaaacccttgatgattattcatcacttggatgagtgcccacacagtcaagctttaaagaaagtgtttgctgaaaataaagaaatccagaaattggcagagcagtttgtcctcctcaatctggtttatgaaacaactgacaaacacctttctcctgatggccagtatgtccccaggattatgtttgttgacccatctctgacagttagagccgatatcactggaagatattcaaaccgtctctatgcttacgaacctgcagatacagctctgttgcttga

SEQ ID NO: 408 - DNA, 135 bp, Homo sapiens
  misc_feature 4, 9, 10, 16, 29, 30: n = A,T,C or G
tcgntcctnnggcgantgggccctctagnngcatgctcgagctattggagtgagacgagcagcagcagctgtggaacccagcagctcccagaggtgctgcagtgccagccccagcattaccactgctaccatcag

SEQ ID NO: 409 - DNA, 237 bp, Homo sapiens
attgggccctctagatgcatgctcgagataaaaccatcaagctatggaataccctgggtgtgtgcaaatacactgtccaggatgagagccactcagagtgggtgtcttgtgtccgcttctcgcccaacagcagcaaccctatcatcgtctcctgtggctgggacaagctggtcaaggtatggaacctggctaactgcaagctgaagaccaaccacattggccacacaggctatctga

SEQ ID NO: 410 - DNA, 668 bp, Homo sapiens
  misc_feature 660: n = A,T,C or G
tatacgactcactatagggcgaatgggccctctagatgcatgctcgagtctttaatataaccccaaatgaaagaaccaaggggaggggtgggatggcacttttttttgttggtcttgttttgttttgttttttggttggttggttcgttattttttaagattagccattctctgctgctatttccctacataatgtcaatttttaaccataattttgacatgattgagatgtacttgaggcttttttgttttaattgagaaaagactttgcaattttttttttaggatgagcctctcctagacttgacctagaatattacatattcctccagtaagtaatactgaagagcaaaagagaggcaggattggggtcacagccgcttcttcagcatggaccaagtgggccttggggattgcagcgttctcgaagtggctgtaggactcgaatttacagaaagccacagaggtgcaacttgaggctctgctagcaagccaccagtgaggctattgggtaaccacctttctatacaggagattggaatctactttgtcatttatccaccacagtgacaaaggaaaagtggtgccgttatgcaatccatttaactcataaacatattactctgagtaactggccagccattcatccggatccgagcncggtacca

SEQ ID NO: 411 - DNA, 63 bp, Homo sapiens
tagggcgaattgggccctctagatgcatgctcgagcggccgcccttttttttttttttttttt

SEQ ID NO: 412 - DNA, 444 bp, Homo sapiens
  misc_feature 4: n = A,T,C or G
tacnactcactatagggcgaattgggccctctagatgcatgctcgagtggcagatatactaacgcaacttttgcagacagatgactctgcagaatttaacctagtgaacaatgccctattaagtatatttaaaatggatgcaaaagggactttaggtgggttgttcagccaaatacttcaaggagaggacattgttagagaacgagcaattaaattcctttctacaaaacttaagactttaccagatgaagtcttaacaaaggaagtggaagagcttatactaactgaatccaaaaaggtcctagaagatgtgactggtgaagaatttgttctatttatgaagatactgtctgggttaaaaagcttacagacagtgagtggaagacagcaacttgtagagttggtggctgaacaggccgacctagaacagaccttcaatccctc

SEQ ID NO: 413 - DNA, 392 bp, Homo sapiens
  misc_feature 6, 9, 35: n = A,T,C or G
tatacnacncactatagggcgaattgggccctctngatgcatgctcgagttattttgcgaatgttacccatctcaggcacatgcaaggcttttttagaagatatgaaaaaatatgcagaaacatttttggaaccctggtttaaagctccaaacaaagggacatttcagattgtgtacaaatctcgaaataacagtcatgtgaatagagaagaagttatcagagaattggcaggaatagtgtgcaccctcaattcagaaaataaagtggatctcaccaatccacagtacacagtggtagtagaaatcatcaaagctgtctgttgcctgagtgttgtgaaagattacatgttgtttagaaaatacaatctccaggaggtggtgaagagccctaa

SEQ ID NO: 414 - DNA, 613 bp, Homo sapiens
  misc_feature 591: n = A,T,C or G
tagggcgattgggccctctagatgcatgctcgagcggccgccctttttttttttttttggttagggggagtctgaattccagatgtgtggcaactaagagatgggtgattatttgtaatttggttaaaatgatcagtctaattttccaaaggtgaaactgaatggcaataagtactgagttctgataaacagaatgccctcacccccaacaaggtagatacctatgtccgaattaccgaaacctgtgaatgttaccttgtgtggcaaaaaggactttgcagatgtgattaaattaagatcttgaaattagatcatgttggattatttgggtggaccaaaaataatcacaaggtctttataaaagggaggcataagggtcacagtcagagaagatgtgacagtggaccagaggtccgaatgatgtagctgcaagccaagaaatgcaggcattctcaaatcgctggaaaaggcagggagcaaattctgcccgagcctccagatggagtgcagcccttccaacaccttgattttagtcccctaagatccatttcagacttctgatcaccagaactgtaagataataaatgttgngttgtgttaagccactgagttt

SEQ ID NO: 415 - DNA, 359 bp, Homo sapiens
  misc_feature 279, 324: n = A,T,C or G
cttttttttttttttttttttttttgccctttagaccaatttattttatatccatttaaaatatcatccaacaaaggacaatgaagtttacatctgggacaggtatacataacttgaggcatttggagtccatcgtgcccactgaataacaactttgctgctgaaatttcttaaaacttaccaaactaaaacaaaaggctgaatgatacaaaaggaggagtatttaggtgtaatctgtcaattggcttttaaaaaaaggaaacacatcctgtttcccanaccagtaaataagcaagagctacatgcagcagtgtgagtattaanacatttctcaagtcttctcaaatgtcgacgcggcc

SEQ ID NO: 416 - DNA, 257 bp, Homo sapiens
tacgactcactatagggcgaattgggccctctagatgcatgctcgagataaaaccatcaagctatggaataccctgggtgtgtgcaaatacactgtccaggatgagagccactcagagtgggtgtcttgtgtccgcttctcgcccaacagcagcaaccctatcatcgtctcctgtggctgggacaagctggtcaaggtatggaacctggctaactgcaagctgaagaccaaccacattggccacacaggctatctga

SEQ ID NO: 417 - DNA, 539 bp, Homo sapiens
ctttttttttttttttaaacaaatagcttaagtattttatttgtttgcaactaagcttgttaacactatataatgaaaatgtacaaagaataatgttgcagtttttggttagatttaagtcaaagacattcattaataaggaatcttcgaatgtgaatattccagaaatttctctaagccatctgatcacaacaactgtctctgaatattaccttactttggaaggtattggcatacatttgaattaaactcagaatttttcaaaataagccctaattaaaaaaactattctatattcaaagtaaaacaatattaatagaactttcctttccagaaacaatgaaggaaacaaggcattttgtaaaatgtggtcctgaacaagtcacagtaaaaaataaatgtatacttaacttccacctcctcaaaacagaggctactttctgttcctcagccttggaaacaaggtgaagaacagcctatatgcgacttcgggcagggggttgccaaaacaaagctgaagcagttgaccatggacacct

SEQ ID NO: 418 - DNA, 559 bp, Homo sapiens
tctgcctgcgcgctgctcctgctctgctacctgaatgttgtaccatctttgggtaggcagacttccctgacgacatcagtgatacccaaagctgagcagagcgtggcttacaaagactttatttattttactgtctttgaaggaaacgttcgcaacgtttctgaagtctcggttgagtatttatgctctcagccttgtgttgtcaatttggaagcagttgtttcatctgagttcagaagtagcattcccgtgtacaaaaaaaggtggaagaatgagaaacatcttcacaccagcaggacacaaatagtacatgtgaaatttccaagcattatggtttacagagatgattatttcatcagacattccatctctgtatctgcagtgatagtacgcgcctggattactcacaaatacagtggcagagactggaatgttaaatgggaggaaaacttgctccatgctgtagcaaagaattataccctcctgcagaccatcccgccttttgaacgccctttcaaagatcatcaagtgtgccttgagtggaacatgggttatattt

SEQ ID NO: 419 - DNA, 640 bp, Homo sapiens
  misc_feature 27, 560: n = A,T,C or G
cactatagggcgaattgggccctctanatgcatgctcgaggtggtggcagggccgccccctgcagtccggagacgaacgcacggaccgggcctccggaggcaggttcggctggaaggaaccgctctcgcttcgtcctacacttgcgcaaatgtctccgagcttactcacatagcatattggtatatcaaaatgaaatgcaaggaaccaaaaataacataattgaaggcagtaaaagtgaaattaaataggaagatcatcagtcaaggaagacccactggagaggacagaaaatgaagcagtgttttatcatgtgtatttcagcaggtcttcttgaaatttaactaaaaatatgactgctctctcttcagagaactgctcttttcagtaccagttacgtcaaacaaaccagcccctagatgttaactatctgctattcttgatcatacttgggaaaatattattaaatatccttacactaggaatgagaagaaaaaacacctgtcaaaattttatggaatatttttgcatttcactagcattcgttgatcttttacttttngtaaacatttccattatattgtatttcagggattttgtactttttaagcattaggttcactaaataccacatctgcctat

SEQ ID NO: 420 - DNA, 646 bp, Homo sapiens
  misc_feature 515: n = A,T,C or G
tacgactcactatagggcgaattgggccctctagatgcatgctcgagtctttaatataaccccaaatgaaagaaccaaggggaggggtgggatggcacttttttttgttggtcttgttttgttttgttttttggttggttggttctctgctgctatttccctacataatgtcaatttttaaccataattttgacatgattgagatgtacttgaggcttttttgttttaattgagaaaagactttgcaattttttttttaggatgagcctctcctagacttgacctagaatattacatattcctccagtaagtaatactgaagagcaaaagagaggcaggattggggtcacagccgcttcttcagcatggaccaagtgggccttggggattgcagcgttctcgaagtggctgtaggactcgaatttacagaaagccacagaggtgcaacttgaggctctgctagcaagccaccagtgaggctattgggtaaccacctttctatacaggagattggnatctactttgtcatttatccaccacagtgacaaaggaaaagtggtgccgttatgcaatccatttaactcataaacatattactctgagtaactggccagccattcatcggatccgagctcggtaccaagct

SEQ ID NO: 421 - DNA, 598 bp, Homo sapiens
ttgggccctctagatgcatgctcgagcaccgtcattaccccgagcacctgcagccccaggaagtcctggccgtcctcgctcaccaggagcccctcttggacccatgggtccaggagctccattttcgcctggaagaccattttcaccctttaatccaggagcacctgtttcacccttttctccatttcgtccatcgaagcctctgtgtcctttcataccagggaatccaggtatcccagctggacctttgatacctggaggtccaggcaatcctcgctctccaggtcgtccgggtctacctgattctccatcttttccagcaggaccagatggacctatagcaccaggaggtcctggagggcctgaaggaccagcttgcccaggttcaccagggggtccttggtatcctggagatccaggggaaccaggatgaccagatgtaccagggggaccgggagggcctggggggccagctggtccaggatagcctgcgagtcctcctactgctactccagacttgacatcatatgaatcatactggggagaatagttctgaggaccagtagggcatgattcacagattccaggggggccagga

SEQ ID NO: 422 - DNA, 519 bp, Homo sapiens
cactatagggcgaattgggccctctagatgcatgctcgagcggccgcgtcgacaacagaaagtgaagtggaaagtttacagtatgataaggacaccaaaccaaatccaaaagccagttcttctgtacctgcttcactggcccagctagtgactacatccaatgcttcagaagtagcttcaggacagaagattgctgtaccagcaacatcacatcatttttgcttttcaatagacttaaggagtatacatgccttggagattggttttccaatcaactgtatattaaggtactcatatccattctttggaagtgcagctcctattatgactaatcctcctgtagaagttcggaaaaacatggaagtttttcttccccagtcttactgtgcatttgattttgcaactatgcctcatcagctgcaagacaccttcttaaggattccattactggttgaactatggcacaaggataaaatgagtaaagatttacttctgggaattgcgagaatccagctttct

SEQ ID NO: 423 - DNA, 587 bp, Homo sapiens
  misc_feature 231, 267, 406: n = A,T,C or G
cttttttttttttttttttttttttgctacaacaaaagaaactttatttaaaaatatttttttacagacatgggtgcttgaaaaagctctttagttaactaactgtgtatggaaatgaaaaaaaattaataaataacattagtaaaacagacttctaaacattaatacactggcaaaataaaatggacttaaaatgaaaatgaatcttaaagctctgctattctctgtaanaatatttaccttctgtttttcttattctttacaggngagaatgattaaatactgctaatataaattttttatattaatgacacatttttaaaatagtccacgaaaatctcacctatgtgtttgttttgttttcttcttaacactgatatacaaattgggactcttcattctgganaaagcatcaggttctctccagcactcccaggctaagaatttcaaaatcttgaataaggaggactttaaaatttctgtctcccaattctttattagttaaaggcaggggaaaactgaggaaagggtaaaagataagtaagatgtcattatatagaaaaacttttgctaaagctcactatagt

SEQ ID NO: 424 - DNA, 566 bp, Homo sapiens
  misc_feature 82: n = A,T,C or G
ctttttttttttttttttttttactggtaacacctttttaataggtcaaagtaactgtacagttcattatattcttcctganaataatttatatcccccaacaaactaaagggagggtatattttttcaaaattaacagaatggatggtgtaactggacatcaaaagaaaaccaaattcctgttttgcttcattctctcctgggaagacagatacaaggaagggttagttaactccagtggctgtaaaatagtcaacatggctttaatctttctttataaattatataaaaatggaaaaaggggatggttctggaacttctcctcaatgcagtttggaggtgctctggtacaaagcatttctgcttccaagagaaataacattgctacaaaaaactggcacattattctgtgaaaaaagacatgagtttttagttgtgttctacagctagttcccgacccaatgcttcacatatccacacgaaagtaaaaggcaggtaagacaaaaagggctgtagttttttctgaaataactcaagtcttcaaaatatagcttttatattctttg

SEQ ID NO: 425 - DNA, 533 bp, Homo sapiens
ctttttttttttttttgatgaaatagataattcaggttgtcatttataattttagagtttgcttcacatatacaatgctgtgttacgaaacaatgaacacttttataaaaaatttatttcacacttttatacaaatatccacaggtaatttctaatcatgaaataattttacaatgctagttagtacaaaaatgtatcaaatgcaaacagaccagtgacttgacttgagatgacatttttaacaaccataaatctaaacaccataacatctttgtttctttgttgaaccaccctcccaacacccttttcaggacattcatcttttttttagtaacacaggtctaaaaacactgtcaaagtatcagctccttagcaatctagcaatctaaacacattagggacacaagttccccaagcaagaaactgagactttaaacactgttataacctgttttacagaaatttttgtaaacaaaatatattttgtgactaagaattccaaagtacaaccaaaacaacgtccttagtatctt

SEQ ID NO: 426 - DNA, 694 bp, Homo sapiens
  misc_feature 559, 581, 676, 688: n = A,T,C or G
ctcactatagggcgaattgggccctctagatgcatgctcgagcggccgcccttttttttttttttttagcctaaaacaatttatcttataatatatttctccttttaatctatttttcccattttttttctttatctttttttttattataaatctttaataagctttctttaattcaaggaaacattacattcatttttctatttacttaatatattatcaactcttatagtatttagctacatttcaatcttctttattttccttctttattccttttttatataacccttatatataacatatacatttttcactatactagtgatttttatttctacaactatctacttattttcatttgctcttttctttctttcttactttctttataacttattctcttcttttctttaagctaatttacattttatttcttatttatatcatttaattatttacatagatttaacttaagccaatattcaatctccctaactttaatttttatttactttttttggttcaccaaattttacataccacaaaacatctctgntttatacgtattactttattgnatcctgacagtattcgtttctaactttttgatatctcatttacaattaatatagcacaattttctatatgactctttaacaactcagtcctatgnattttttttctncattta

SEQ ID NO: 427 - DNA, 447 bp, Homo sapiens
cttttttttttttttttgctttttaagttttatttgcaatacttatatgatagatgttttttaattcctggaaaaataaatacacattattaataatagttatctggtagatggataacggtacatttctatgtaacattttcattttttgtaatcagaatgtattacctttacagataggcaaacacaaagatttgggaaaatgcatgtaaaatctaagaaaaaaggtaaattgtagatataatacattcacaaaaagaatataactgtgttgagctatatttacagatataaaaagatgaacaaattacattaggttttttaaaaaaagacaacctaacagtatgtatcgatgatagcacgtttgttctttaaaaaaatttgtgaattggtcaggagcagtggctcatgcctgtatttccaatattttgggaggctatggtggga

SEQ ID NO: 428 - DNA, 536 bp, Homo sapiens
tacgactcactatagggcgaattgggccctctagatgcatgctcgagctccttggcgagcacgtgaccccggcgggcacgcaggagggcaggcaggcccctgcgcaggcgctgggtggactgcttccaggtgtcatattggaagaacttgcccacggggtatctggggaagttgtccggaagcacggtcggaggggtcgacacgtccctctcggacttggcgggggtagcacagtacgtctccaggagggccaggtcacagctgcggaaacagcactcctcaacgatgccacggctgcgacggctcacacggcttgcgggcctgctgaagtagaagccgcggtccccacagacgaactggagggtgtccaccagctccccgccgcacagggtctcactggggcggtaagcagcaatgcagcacgaggcgaaggccaagaaggtgagaagcaccagcatcgacttccccattgggattcccattggtgtagctcagcagaaggctcgctggggcaggaggaggaggaggaagaggag

SEQ ID NO: 429 - DNA, 549 bp, Homo sapiens
  misc_feature 513, 534: n = A,T,C or G
gactcactatagggcgaattgggccctctagatgcatgctcgagtgcaagctggaggcagactgagtcctcggatgcttcggccagttctgactctagaggacaatacatacctctcatcaaagtagccagaacggattttacttggcatctagatccgtggtgtgcttcattgtccgggggtcatatccattgtgtcgctcttggatcacagggtcaaacaggtcagcaaatacctcataggtctcctcatctccagccaccatgcccacagtcttgatgaaggggtggccagggttgtccacgccagtctggatacactgatctagcgtccaaccagtgggtgtggtcttgtcgcagagccgtgcatagactgctggggtcaggtgactggccatgcagttgttgtgctttcggaggtctgggtactcagcgctggggagggggtacccagtaaccatggagggagggcacagacgcctagacctagtgcagttacctgggagctgtccanttggccatgtctggctcgggngatacagcctccgtc

SEQ ID NO: 430 - DNA, 279 bp, Homo sapiens
  misc_feature 34: n = A,T,C or G
atacgactcactatagggcgaattgggccctctngatgcatgctcgagaaaatcaagtaactatcatttggagtgtctttgtaaaatgaaacacttgttcttttacaaaagctaagcatcttttgttaagctagttaactccccagcttataaaataggacaacgaggtggccaggaaagtaagacaaattcaaacatcagctggataatttatattttaaatatatgtatagtcaatattgtgaaatctctaactctacataaaatacttcagatgac

SEQ ID NO: 431 - DNA, 565 bp, Homo sapiens
  misc_feature 237: n = A,T,C or G
ctatagggcgaattgggccctctagatgcatgctcgagcggccgccctttttttttttttttggctctagagggggtagagggggtgctatagggtaaatacgggccctatttcaaagatttttaggggaattaattctaggacgatgggcatgaaactgtggtttgctccacagatttcagagcattgaccgtagtatacccccggtcgtgtagcggtgaaagtggtttggtttanacgtccgggaattgcatctgtttttaagcctaatgtggggacagctcatgagtgcaagacgtcttgtgatgtaattattatacgaatgggggcttcaatcgggagtactactcgattgtcaacgtcaaggagtcgcaggtcgcctggttctaggaataatgggggaagtatgtaggagttgaagattagtccgccgtagtcggtgtactcgtaggttcagtaccattggtggccaattgatttgatggtaagggagggatcgttgacctcgtctgttatgtaaaggatgcgtagggatgggagggcgatgaggactaggatgatggcg

SEQ ID NO: 432 - DNA, 248 bp, Homo sapiens
ctatagggcgaattgggccctctagatgcatgctcgagataaaaccatcaagctatggaataccctgggtgtgtgcaaatacactgtccaggatgagagccactcagagtgggtgtcttgtgtccgcttctcgcccaacagcagcaaccctatcatcgtctcctgtggctgggacaagctggtcaaggtatggaacctggctaactgcaagctgaagaccaaccacattggccacacaggctatctga

SEQ ID NO: 433 - DNA, 593 bp, Homo sapiens
ctttttttttttttttactttgacaacaaattatattttaaatgtttcatatttacttttatatttccatacaatcagaaacagtaaaaaaaatttggagagcacataaaaacatcttaaagttaaaaatataaagccttgtatttaaaaatgcagtcatttaaataatattataagaatctatttgtacataataaacaagtttcaaccagcaagaaattactaatattgactgtggagttttggctgttttaatagttctaactcattattccgtaattcaacacagcactaccaacacagctggcaatgacaagactgggagtatcaaactaggattgttagttcaattaaaatttcagataaacaataatgtacttatactaaaaaattatttgttgtttatctgaaatgaaaatttaactgggtacccaattgtttgtttgtttaatctaaaaaccctgattgaaatttatctaataaaacatcatttaatatctaaaataaaataaatttactataacatctttataactattcaatcaatgattcatcttctatttttccaaattcttgcacaaatatttgatgct

SEQ ID NO: 434 - DNA, 567 bp, Homo sapiens
  misc_feature 501: n = A,T,C or G
ctttttttttttttttttttaaatgcatcagcaagtttatttacaaatgcaattgaacagaaaggctcaccagtttctgaagaagacttctagtatacaaaccatggttatttttcattaatgaaaataagcagctttctattgggaattacttagcaacatttctggtaaagaaaatagagctcccttcatcaagcaaataaatggtacattaactgcatttttaaaaatcagaataataggtagaaggaaggatacagaaagcacatttggggatagattttaatgaaattttccatatggttctgcattaatttagaatacattacaataaacagagcaaatgcaattatgtatttatattaactatttcaaataatgtttaagaacctttttttaaaaaacaataaaataccctcttcaaaacaccactaactagaaagtcaaactagatcattatctgcctcaaaaatattcgtaggttcttattttttcccttgngctctcaagatgctgaattcaacaggtaaatactgcacttttccccacacacaattaccttataaa

SEQ ID NO: 435 - DNA, 474 bp, Homo sapiens
  misc_feature 53, 55, 96, 212, 239, 254, 269, 341, 447, 449, 463: n = A,T,C or G
cttttttttttttttttttttatttttaaaactttattttaaaaatatgagcntntattttaaaagttttgataattattgccattattttcttgngattggtacaatttaaaaataagtctatgttttcacattgattttaaaaaatatagcatgtttgaattacaaatgattaagcaaactctattacttcatagctgaccatcttccanaaaattcccacttaattgaatacttanaaaaaaatggccagnggccgattgaaaggnatattaaaattaagggcagttttaattctgaagacaaatatcttcatggaaatctatttgtaagcttctganattgctgctgaaagtctacagtctgggaatataccaattcccctttacaactgatgcagatcattatgaaatactggaaggcataccctacaatttaggaattggngnggctgccactgctntgctctcaatt

SEQ ID NO: 436 - DNA, 650 bp, Homo sapiens
  misc_feature 627: n = A,T,C or G
tatacgactcactatagggcgaattgggccctctagatgcatgctcgagcgcatctgcccgccctagtcggggaagagcaggaagccggagaagacgctgtcagagccctggatgcccaccatgtcgtagtagtcattgacagccagccacacctcctcgcccacctgcaacctcagcagcacaccgcccgagttgacctgattggttttggacgtgtggccacagaaggtgaccactttgacgccgctgcggtacagcagcacgcacaggttggctgtatgcgacgcgtggtagacaaagtagtagaggccggggactttgcaggtgaacttgccagtgctcgtgtcataatctccctgcgggttggtgaggaccgcgttgaatctgatcaggctgttgggtgcagggggctggtgggtctgccgagtgaccgtgaacactgactggaatttctgcttgtatctgccctcctcacctggctctccagggatgcccatggggccgggcacccctggcatcccagggggtcccatggggccatttttcccaggatggccgggtaagccgggttctcccttctgccctttgggtcctcggatccgagctcggtaccaagcttggcgtantcatggtcatagctgttcctgtg

SEQ ID NO: 437 - DNA, 707 bp, Homo sapiens
  misc_feature 25, 651, 676, 706: n = A,T,C or G
cactatagggcgaattgggccctcnagatgcatgctcgagcggccgccctttttttttttttttacatttggaaaatatactttattcaataatataaacaatgtagatatatttgattaataatcattttaagtttattgcacagatgcacatgtcaataattagtgtttttcagatgggatgatatacattctgcttttatttttatctctttggtaacaattattgacagaacaatgaaacaaagataaattgttttacagttgtaatacccttgtatggtaattctcagcctcttttatcttatattctactagcacttacatctaataggtctcaataaagtagaaatgtaaaagtatgtattttcagaaaaggtcatatttcataaagattctgttactatgttagtcatttatcataagtgttaagtctaagaaaagttgtaatagaaattgctaagactttaaaataaaaactactcctttagtagttaaaaaatgttattatatggttgagtataaattttattgccctagtgacagtaaaaaacaaaaacgtttagcaaaaaaatattgccattaatagctttatctaaaattctacaacagacaaagcagaataaacgttttggcatccagaggtcaggngatacagaaatgaagttcagcaggngcaaaagatatatcaagggcatggtagttna

SEQ ID NO: 438 - DNA, 476 bp, Homo sapiens
  misc_feature 26, 28: n = A,T,C or G
cactatagggcgaattgggccctctngnatgcatgctcgagcggccgccctttttttttttttttttaacaaataaaattctttatttaaatttctcttgtggggaaaatatttttctttaaagcacacttaaaagtaatttgcatttacttcctgtaaagcatttccatttcacaattagcaaaactaaaaggctatgtctcttcatgcatttatttttgttagaaaaatgtcccatggtgctatcaaaccgattttaaccatcatcaagcttaactttgcctctgttgacaacatgactacaaacatgaatcaaaaaggagttaaggaattttaagccataaggtttcaattatagcttaccaattatgtaattagctgacaaaaatcaagtctgatgtagaatagctgtcatctacttaactgcagataatcatggcattttcatttaagatgatctgaacttatgaaataaa

SEQ ID NO: 439 - DNA, 591 bp, Homo sapiens
ctttttttttttttttactttgacaacaaattatattttaaatgtttcatatttacttttatatttccatacaatcagaaacagtaaaaaaaatttggagagcacataaaaacatcttaaagttaaaaatataaagccttgtatttaaaaatgcagtcatttaaataatattataagaatctatttgtacataataaacaagtttcaaccagcaagaaattactaatattgactgtggagttttggctgttttaatagttctaactcattattccgtaattcaacacagcactaccaacacagctggcaatgacaagactgggagtatcaaactaggattgttagttcaattaaaatttcagataaacaataatgtacttatactaaaaaattatttgttgtttatctgaaatgaaaatttaactgggtacccaattgtttgtttgtttaatctaaaaaccctgattgaaatttatctaataaaacatcatttaatatctaaaataaaataaatttactataacatctttataactattcaatcaatgattcatcttctatttttccaaattcttgcacaaatatttgatg

SEQ ID NO: 440 - DNA, 642 bp, Homo sapiens
gtatacgactcactatagggcgaattgggccctctagatgcatgctcgagagagctacctttttccttttatgtataaggacacagctagaaaatgccatgtatgatccagaggcctaatttgttgatcccttaatcttggacttcccaccattgagaacagcgagaaataaatttctgttgtttataagctgccaagttcatagtatttcattacagcagcctgcacagaccaaggcagtatttttttttaatgtcttctaagggaacccccccaaaagtaaacaaaaatctacaaaagttatttgtatgatcaaaatcaaaacattcttattcacgaaatagaagctacagtaaattttcaaaaaataagagttaaaaaactccccccatatgatatattttacagtttcacaagggtaccaggtcgtgaaggaattttattaaatctattaaatcatagatagcttttaataagttcaattttactttaagagctaataagttacttgatattaacctttttacttataaggtaagtgggagatatgacatcataatcttagacatttaaaaaatcctgagaaagattatttcaatcttttacagtttggggatccgagctcggtaccaagcttggcgt

SEQ ID NO: 441 - DNA, 233 bp, Homo sapiens
ctatagggcgaattgggccctctagatgcatgctcgagaggcggagaggatcatgtccgggaactgcggggtagtagcgatctgggttacccagccgttgtggcccttgagggtgccacgaagggtcatctgctcagtcatggcggcggcgagagcgtgtgtcgctgcagcgacgaggatggcactggatggcttagagaaactagcaccacaacctctccgtcgacgcggcc

SEQ ID NO: 442 - DNA, 503 bp, Homo sapiens
  misc_feature 13, 332, 499: n = A,T,C or G
attgggccctctngatgcatgctcgagcggccgcccttttttttttttttttaacaaataaaattctttatttaaatttctcttgtggggaaaatatttttctttaaagcacacttaaaagtaatttgcatttacttcctgtaaagcatttccatttcacaattagcaaaactaaaaggctatgtctcttcatgcatttatttttgttagaaaaatgtcccatggtgctatcaaaccgattttaaccatcatcaagcttaactttgcctctgttgacaacatgactacaaacatgaatcaaaaaggagttaaggaattttaagccataaggnttcaattatagcttaccaattatgtaattagctgacaaaaatcaagtctgatgtagaatagctgtcatctacttaactgcagataatcatggcattttcatttaagatgatctgaacttatgaaataaaggatccgagctcggtaccaagcttggcgtaatcatggncata

SEQ ID NO: 443 - DNA, 186 bp, Homo sapiens
attgggccctctagatgcatgctcgagcggccgccccctcgcccgtcacgcaccgcacgttcgtggggaacctggcgctaaaccattcgtagacgacctgcttctgggtcggggtttcgtacgtagcagagcagctccctcgctgcgatctattgaaagtcagccctcgacacaagggtttgagag

SEQ ID NO: 444 - DNA, 620 bp, Homo sapiens
  misc_feature 25: n = A,T,C or G
cactatagggcgaattgggccctcnagatgcatgctcgagaagtaattatcagttggtttggatttttggaccaccgttcagtcattttgggttgccgtgctcccaaaacattttaaatgaaagtattggcattcaaaaagacagcagacaaaatgaaagaaaatgagagcagaaagtaagcatttccagcctatctaatttctttagttttctatttgcctccagtgcagtccatttcctaatgtataccagcctactgtactatttaaaatgctcaatttcagcaccgatggccatgtaaataagatgatttaatgttgattttaatcctgtatataaaataaaaagtcacaatgagtttgggcatatttaatgatgattatggagccttagaggtctttaatcattggttcggctgcttttatgtagtttaggctggaaatggtttcacttgctctttgactgtcagcaagactgaagatggcttttcctggacagctagaaaacacaaaatcttgtaggtcattgcacctatctcagccataggtgcagtttgcttctacatgatgctaaaggctgcgaatgggatccgagctcggtaccaagcttggcgtaatca

SEQ ID NO: 445 - DNA, 634 bp, Homo sapiens
tagggcgaattgggccctctagatgcatgctcgagcggccgccctttttttttttttttactttgacaacaaattatattttaaatgtttcatatttacttttatatttccatacaatcagaaacagtaaaaaaaatttggagagcacataaaaacatcttaaagttaaaaatataaagccttgtatttaaaaatgcagtcatttaaataatattataagaatctatttgtacataataaacaagtttcaaccagcaagaaattactaatattgactgtggagttttggctgttttaatagttctaactcattattccgtaattcaacacagcactaccaacacagctggcaatgacaagactgggagtatcaaactaggattgttagttcaattaaaatttcagataaacaataatgtacttatactaaaaaattatttgttgtttatctgaaatgaaaatttaactgggtacccaattgtttgtttgtttaatctaaaaaccctgattgaaatttatctaataaaacatcatttaatatctaaaataaaataaatttactataacatctttataactattcaatcaatgattcatcttctatttttccaaattcttgcacaaatatttgatg

SEQ ID NO: 446 - DNA, 574 bp, Homo sapiens
  misc_feature 10: n = A,T,C or G
tgggccctcnagatgcatgctcgagcggccgcccttttttttttttttttactttgacaacaaattatattttaaatgtttcatatttacttttatatttccatacaatcagaaacagtaaaaaaaatttggagagcacataaaaacatcttaaagttaaaaatataaagccttgtatttaaaaatgcagtcatttaaataatattataagaatctatttgtacataataaacaagtttcaaccagcaagaaattactaatattgactgtggagttttggctgttttaatagttctaactcattattccgtaattcaacacagcactaccaacacagctggcaatgacaagactgggagtatcaaactaggattgttagttcaattaaaatttcagataaacaataatgtacttatactaaaaaattatttgttgtatatctgaaatgaaaatttaactgggtacccaattgtttgtttgtttaatctaaaaaccctgattgaaatttatctaataaaacatcatttaatatctaaaataaaataaatttactataacatctttataactattc

SEQ ID NO: 447 - DNA, 540 bp, Homo sapiens
gccaactcacacaaggcaggtgagtgaggaaatccagagttgccatggagaaaaatccagtgtcagcattcttgctccttgtggccctctcctacactctggccagagataccacagtcaaacctggagccaaaaaggacacaaaggactctcgacccaaactgccccagaccctctccagaggttggggtgaccaactcatctggactcagacatatgaagaagctctatataaatccaagacaagcaacaaacccttgatgattattcatcacttggatgagtgcccacacagtcaagctttaaagaaagtgtttgctgaaaataaagaaatccagaaattggcagagcagtttgtcctcctcaatctggtttatgaaacaactgacaaacacctttctcctgatggccagtatgtccccaggattatgtttgttgacccatctctgacagttagagccgatatcactggaagatattcaaaccgtctctatgcttacgaacctgcagatacagctctgttgcttgacaacatgaaga

SEQ ID NO: 448 - DNA, 581 bp, Homo sapiens
attgggccctctagatgcatgctcgagcaccgtcattaccccgagcacctgcagccccaggaagtcctggccgtcctcgctcaccaggagcccctcttggacccatgggtccaggagctccattttcgcctggaagaccattttcaccctttaatccaggagcacctgtttcacccttttctccatttcgtccatcgaagcctctgtgtcctttcataccagggaatccaggtatcccagctggacctttgatacctggaggtccaggcaatcctcgctctccaggtcgtccgggtctacctgattctccatcttttccagcaggaccagatggacctatagcaccaggaggtcctggagggcctgaaggaccagcttgcccaggttcaccagggggtccttggtatcctggagatccaggggaaccaggatgaccagatgtaccagggggaccgggagggcctggggggccagctggtccaggatagcctgcgagtcctcctactgctactccagacttgacatcatatgaatcatactggggagaatagttctgaggaccagtagggcatgattcacag

SEQ ID NO: 449 - DNA, 640 bp, Homo sapiens
  misc_feature 4, 30, 31: n = A,T,C or G
gacncactatagggcgaattgggccctctnnatgcatgctcgagaggacaaaaacccacaccggacatagatcacaaaacttcctagaactctcctttaaatcggaagaaatttgtaaaatgtgatatgaaatacaactctacaaacatccaaaatacatttctggtcataattaatcgtatttgacattttcctctaagtttaatgcaactttaaataatttaggctttttcctaacatgatagatttttttcagtatcagaaatggacaagaggaaactccagtaaagagaaaagcaatgaatttaaaagggtgcagaatctgaaaacaaactaaccacaatgtacatttaattgtacttaattgtatatttcatttaaatagtccttctcaggggtttaataatttagaatcaatagttcccttcaaaacataataaaatatttacactttataaaatattaaccgattaacaatacagccgtgttgtttataagagtgtaactgaagtcctgcaaatcatgctgttgacacaagcctgtgaggttagcgaagtgatccttagcaaaatgtaaatgaagatcttcagacagtggtgtttataaaatagctcattaatgacttaggattgaatcgctc

SEQ ID NO: 450 - DNA, 567 bp, Homo sapiens
  misc_feature 27: n = A,T,C or G
ctttttttttttttttttagaaaaggnggaaatggccttttatttaaatatgaggaaaaaattagaattaagtacagtaagattatttttaaaaaagcagacaagttagaacaaacattttattattaaaataaacttttgtataaaagcattacagatcaaaagctgtatttacacttatcgattcaaggtccaattatgcatcaaacattgaatggcacagcaatggtttacatatgcaagtaaattggacatacaaacacttagattccacctctaccaaataccttgattaatgcaaagaggagggggaatactgacacaggaaacctgcccagaaactagactggcagagatgtcaggttaacaaactgctaaaagttacatctccaaaaaggcacttatcattgttataaaagtgcttaaaatctaaacttgaaccttgtgcctggtttataaatttacaagaaactgcaaagaaccacagactagtttttaatatcaagtttccatacaaaattgtccaagaatttatttgcaataccttacatgtgaactgaaataaac

SEQ ID NO: 451 - DNA, 536 bp, Homo sapiens
  misc_feature 12, 67, 77, 307, 372, 406, 413, 422, 431, 433, 462, 465,484, 494, 505, 517, 522, 523, 525: n = A,T,C or G
tgggccctctanatgcatgctcgagcggccgcccttttttttttttttttttttttttttgagacanagtttcactnttgttgcccaggctggagtgcaacggcgcgatcttggctcaccacaacctccacctcctgggttcaagtgattctcctgcctcagcctcccgagtagctgggattacaggcatgtgccaccacacccggctaattttgtatttttagtggacacagggtttctccatgtcggtcaggctagtctcaatctcccgacctcaaatgatccacctgcttcggcctcccaaagngctaggattacaggcatgagccaccgagcccggcctatgtttatatatcttgcactacagccagngtgtgtagctcaaggacttgcctccactgggggngagggcnctggggganaaaactgancngccccgtgatgaacatggggctcctttgnggnggcataagtttcagtaaanattaaacatntcatttttatnttaaaagttttnttttnnanaatgcaaaatt

SEQ ID NO: 452 - DNA, 595 bp, Homo sapiens
tatacgactcactatagggcgaattgggccctctagatgcatgctcgagaagtaattatcagttggtttggatttttggaccaccgttcagtcattttgggttgccgtgctcccaaaacattttaaatgaaagtattggcattcaaaaagacagcagacaaaatgaaagaaaatgagagcagaaagtaagcatttccagcctatctaatttctttagttttctatttgcctccagtgcagtccatttcctaatgtataccagcctactgtactatttaaaatgctcaatttcagcaccgatggccatgtaaataagatgatttaatgttgattttaatcctgtatataaaataaaaagtcacaatgagtttgggcatatttaatgatgattatggagccttagaggtctttaatcattggttcggctgcttttatgtagtttaggctggaaatggtttcacttgctctttgactgtcagcaagactgaagatggcttttcctggacagctagaaaacacaaaatcttgtaggtcattgcacctatctcagccataggtgcagtttgcttctacatgatgctaaaggctgcgaatg

SEQ ID NO: 453 - DNA, 318 bp, Homo sapiens
  misc_feature 65, 68, 251, 310: n = A,T,C or G
tgggccctctacatgcatgctcgagcggccgcccttttttttttttttttttttttttttacacncanattgtttatttaaaaatgcccaaaacacaaaaatagacttttaaggtaataatatatattactaaatatattatagtctacttataataattatatcgtcgttttcaatattacaaaaaaaggaagaaaaatacaagggaagcagacgacccaatatatataaatactataaaatcatattanaataaataaagtcgtcataaataaagggcccattgatttatgggtggggtttggcaacngctttggc

SEQ ID NO: 454 - DNA, 562 bp, Homo sapiens
ctttttttttttttttttttttactttgacaacaaattatattttaaatgtttcatatttacttttatatttccatacaatcagaaacagtaaaaaaaatttggagagcacataaaaacatcttaaagttaaaaatataaagccttgtatttaaaaatgcagtcatttaaataatattataagaatctatttgtacataataaacaagtttcaaccagcaagaaattactaatattgactgtggagttttggctgttttaatagttctaactcattattccgtaattcaacacagcactaccaacacagctggcaatgacaagactgggagtatcaaactaggattgttagttcaattaaaatttcagataaacaataatgtacttatactaaaaaattatttgttgtttatctgaaatgaaaatttaactgggtacccaattgtttgtttgtttaatctaaaaaccctgattgaaatttatctaataaaacatcatttaatatctaaaataaaataaatttactataacatctttataactattcaatcaatgattcatct

SEQ ID NO: 455 - DNA, 80 bp, Homo sapiens
gcatgctcgagcggccgcgtcgacctttttttttttttttttttttttttttttttttttttttttttttttttttttgg

SEQ ID NO: 456 - DNA, 95 bp, Homo sapiens
  misc_feature 80: n = A,T,C or G
gtcgaccttttttttttttttttttttttttttttttttttttttttttttttttttttttggagggggaaaccactttnttttcatcaaaaatt

SEQ ID NO: 457 - DNA, 613 bp, Homo sapiens
  misc_feature 81, 85, 120, 149, 167, 170, 184, 297, 301, 315, 339, 344,354, 362, 374, 383, 390, 396, 403, 417, 427, 474, 476, 484,489, 499, 507, 512, 537, 541, 544, 562, 595, 601: n = A,T,C or G
ctatagggcgaattgggccctctagatgcatgctcgagcggccgccctttttttttttttttttttttttttttttttaangacngaataaagctttattttaatgtaaaatatgaaaanaaaaatttatatactcatatataacaacnttccaaaatgttttctgnggnacaaatggatcatnttaaaaagtctgtaaagaattcatcctccacccccatatgccaaaatatgatttcacataatttatcttcaaaacttatgaacagacttggaatcacaaaagcccaggaaacnccanaaaaagtgatggtncaaacaacaggttttgttttaggntccantagtaagcanccctacanatggaacagganaacactttntgaaggngcccantcagganacaggttaaaaaantctttggggntggttcatttcctgtagccaagcttgtctttaaaagtcaggctgggngngattctgngactntttaaggacntgaggganaaaanagtttcacttaaaagtcacagctgngtgnganattctaggcttattttanatatctaacttttttttccctcctttttatcanaaaggngactttgtaggg

SEQ ID NO: 458 - DNA, 571 bp, Homo sapiens
  misc_feature 13, 439, 512: n = A,T,C or G
tgggccctctagntgcatgctcgagcggccgcgcggctgactgcgactcgggagctccgggagcggcccgcgcaggagcaccagcgaaagcagccagtctgagatattgacactacagaaaaaactgacagcttactccttgtattgattctactcttctctacaaatatagactccgttccctaccacagccttatagttctgccccagagacaagtatgaataccacagacaacggtgtcaactgtctgtgtgctatctgtggggacagagcaacaggaaaacactatggggcatccagctgtgatgggtgcaagggtttcttcagacgcagcattcgtaagagtcacgtttattcttgcaggttcagtcggcaatgtgttgttgacaaggacaaaaggaatcaatgtagatattgtcgattaagaaagtgttttanagcgggaatgaaaaaagaagctgtacaaaatgaacgtgacagaataagcaccagaagaagcacatttgatggnagcaacatcccctccattaacacactggcacaagctgaagttcggtctcgccagatctc

SEQ ID NO: 459 - DNA, 64 bp, Homo sapiens
  misc_feature 54: n = A,T,C or G
cttttttttttttttttttttttttttttttttttttttttttttttttacttngacaacaaat

SEQ ID NO: 460 - DNA, 97 bp, Homo sapiens
  misc_feature 80, 81, 91: n = A,T,C or G
ctatagggcgaattgggccctctagcatgcatgctcgagcggccgctcgcgatctagaaccttttttttttttttttttnnttttttttcnaaggga

SEQ ID NO: 461 - DNA, 592 bp, Homo sapiens
cttttttttttttttttactttgacaacaaattatattttaaatgtttcatatttacttttatatttccatacaatcagaaacagtaaaaaaaatttggagagcacataaaaacatcttaaagttaaaaatataaagccttgtatttaaaaatgcagtcatttaaataatattataagaatctatttgtacataataaacaagtttcaaccagcaagaaattactaatattgactgtggagttttggctgttttaatagttctaactcattattccgtaattcaacacagcactaccaacacagctggcaatgacaagactgggagtatcaaactaggattgttagttcaattaaaatttcagataaacaataatgtacttatactaaaaaattatttgttgtatatctgaaatgaaaatttaactgggtacccaattgtttgtttgtttaatctaaaaaccctgattgaaatttatctaataaaacatcatttaatatctaaaataaaataaatttactataacatctttataactattcaatcaatgattcatcttctatttttccaaattcttgcacaaatatttgatg

SEQ ID NO: 462 - DNA, 171 bp, Homo sapiens
  misc_feature 119, 130, 149, 156, 158: n = A,T,C or G
ctatagggcgaattgggccctctagatgcatgctcgagcggccgcccttttttttttttttttatttttttttttttttttttttttttttttttttttttttttttttttttttggcnctaaaaggggnaaaaggggtgccaaagggnaaatacngnccccatttcaaaa

SEQ ID NO: 463 - DNA, 546 bp, Homo sapiens
  misc_feature 33, 543: n = A,T,C or G
ctatagggcgaattgggccctctagctgcatgntcgagcctgggacgggaaggatgcagtgggctgtgctcacaccaatgcaatccaggcctgggcgacagagtgagaccaaaagggaaaacttctgtattatctgaatagagtaaaatttgactctggcctttagtatgaataaagagctggtagctacggctctgattatgggattatcactatagggtgggcacagggctggcatttccatgtgaaatggggaggtgaagattgagttggcactgattccaacttgcccatgaccttcggtggtcccttcctgggttggtcttcagcttgctccaaattaatgtgacagggttagacatgatctttcctgaagtcccttctagttcaacattctatgatgttctttgctggcttcagcaaagttatggggaagctgaacacatacaattcaaaagaagcactattaattaaaaccgtattaagaccactttaacagggagggaatgaatatgaatgtgatgagtctgtcacatgactatnctt

SEQ ID NO: 464 - DNA, 671 bp, Homo sapiens
  misc_feature 304, 429, 592: n = A,T,C or G
tatacgactaatatagggcgaattgggccctctagcatgcatgctcgagcggccgcccttttttttttttttttatatttttttattttgttttctagtttatgttttatgctatttttattccatactcctccgaaattctatttttaactttattatttttattttttcatctatattctactttttctttacctcgaattcttctttcgtattcctttttaattggttaattctcagtacgaattcttattattatataaattttttatatttttttatatcacttatgtttttcttttanattatttgctttcattctctgttatttatttttattaatttaaatttaatagcaaatttttttttgaaaactttgttctcattagttatttctttttaatttatttcttttatcttcatttttgnttattattcgaaagttattttctaaatttattattttatcttagtttatgattattctccatttatattttaattttcttacctgcctaatcctattctattttttcactatcaatatttaatacttctattttattacttttacttcaaaaaatatttttgngattcttataataaattaaaatattatttaaactacttaataattcctttaacaatttttcttttaggtcgacgcggcc

SEQ ID NO: 465 - DNA, 191 bp, Homo sapiens
aattgggccctctagatgcatgctcgagcgatggcctatgtccccgcaccgggctaccagcccacctacaacccgacgctgccttactaccagcccatcccgggcgggctcaacgtgggaatgtctgtttacatccaaggagtggccagcgagcacatgaagcggttcttcgtgaactttgtggttgggca

SEQ ID NO: 466 - DNA, 112 bp, Homo sapiens
  misc_feature 6: n = A,T,C or G
ggcgantgggccctctagatgcatgctcgagcggccgccctttttttttttttttttttttttttttttttttttttttttttttttttttttttttttttttttttttttt

SEQ ID NO: 467 - DNA, 500 bp, Homo sapiens
  misc_feature 423, 434, 454, 487, 491, 500: n = A,T,C or G
gaatgctttataaacaataccataacaaacatatggattacttctttaaaaagtgtatctgttaattgcttttacaatattggaaaactgagataattattcttttaatgtttataaatcttaaggatatattgtaactggttcatacataactatttgaagaatttaaaaagtcaactatataacttgtcagcataaaattaatatctgaaccttgggacctgatgtttaggctactgttttgaagtttcttaaatttaacttttttttcatattgctaatacatttaaaaggttaacctatatgaataaatgagaaacaatgatagaaacgttatatacctcaggtgtgcgaaagtagagaaaaaggttatgagctacaggtatcatatgttcattccattggaaggatggttaatattanactgttaaggncaagaaacagtgcacatganaaattctgccttactaaaaaaaatgtacaggcnttanttgggggan

SEQ ID NO: 468 - DNA, 104 bp, Homo sapiens
  misc_feature 99: n = A,T,C or G
gcatgctcgagcggccgcccttttttttttttttttttttttttttttttttttttttttttttttttttttttttttttttttttttttttttttccnggggg

SEQ ID NO: 469 - DNA, 711 bp, Homo sapiens
gtatacgactcactatagggcgaattgggccctctacatgcatgctcgaggagcccatgatccgcggggagacaggcatttaacgacgactcacacgatcacttaaatacaactgtggtgaaccgcacaagagggacgcgcggcggtctgcggggaatgacgaggccgacctcgtctgcgacccagggagggcaagggtggaccaggcaaagggaacagaggactgggacctggaggtgggcgggaggcgtttggttcattggaggaaaggaatagccctgtgtgtgatgagcattgagaggaggtctggcgagcaccatctagggctgaagaactaggcagtggctccagcgcggggcggtgggggggacaagtgagccagggcaagaagaatggatttggccctagagtacgggttctccaaatgtaacctcggccctacagatctctgagactatgtcagggggtttgtgagattttataacaaaattaagatgttagtacaatatcgtgtttcgccgccgggcgcggtggctcacgcccgcaatcccagcactttgggaggccgaggcgggcagatcacaaggtcagaagatcgagaccatcctggccaacacggtgaaaccccgtctccactaaaaacacaaaaagttagccgggcgtggcggcgggcccctgcagtcccagctactcgggaagctgaggcaggag

SEQ ID NO: 470 - DNA, 108 bp, Homo sapiens
  misc_feature 101, 105: n = A,T,C or G
ctcactatagggcgaattgggccctctagatgcatgctcgagcggccgccctttttttttttttttttttttttttttttttttttttttttttttttatnaaangaa

SEQ ID NO: 471 - DNA, 569 bp, Homo sapiens
  misc_feature 119, 142, 224, 315, 382, 390, 397, 451, 458, 545, 555, 563: n = A,T,C or G
atgcatgctcgagcggccgccctttttttttttttttttttttttgaaaaagtcatggaggccatggggttggcttgaaaccagctttggggggttcgattccttccttttttgtctanattttatgtatacgggttcttcnaatgtgtggtagggtggggggcatccatgtagtcactccaggtttatggagggttcttctactattaggacttttcgcttcnaagcgaaggcttctcaaatcatgaaaattattaatattactgctgttagagaaatgaatgagcctacagatgataggatatttcatgtggngtatgcatcggggtagtccgagtaacgtcggggcattccggataggccgaaaaagtgttgtgggaanaaagttanatttacnccgatgaatatgatagcgaaatggattttggcgtaggtttggtctagggtgtanccctganaataggggaaatcagtgaatgaagcctcctatgatggcaaatacagcccctattgataggacatagtggaagtgagctacaacgtantacgtgtcgngtagtacnatgtct

SEQ ID NO: 472 - DNA, 180 bp, Homo sapiens
gcatgctcgagcggccgccctttttttttttttttgttttagttcagtttattttttaatatgtcctgagttctttctgttcataaaattatgatcttatgacagctgtaacttttaattaataatattaacaaatcattattgatataggcttttcaatttgctcaagattaggaattg

SEQ ID NO: 473 - DNA, 146 bp, Homo sapiens
  misc_feature 85, 90, 96, 104, 118, 119, 137, 145: n = A,T,C or G
agggcgaatgggccctctacatgcatgctcgagcggccgcccttttttttttttttttttttttttttttttttttttttttttncccancttacnctcaaatngtttatttaaaaanncccaaaacaaaaaaatanacttttang

SEQ ID NO: 474 - DNA, 479 bp, Homo sapiens
  misc_feature 197, 295, 344: n = A,T,C or G
agggcgattgggccctctacatgcatgctcgagcggccgcccttttttttttttttttccttttaaattaaacaaccagttttattagtgcatgcactgaactaaactgaaagaaaataaacttatgccaaaaatttctgtgcaaaatttacataaaaggtacaaaaatatgtacagacttaatttgttatatacanaaaagaagccctgaagttttcatccattaatgaaaatgtcattaacacttgtaacaatgtaacaaaaaatcatatagcacgtaatttgttaacacaanaactccattatccaaagaaccagcaaaatttgatccaaacttacaaggngaaaaatctaaatctatgattctgttgtcatcatgaaaacatccattttaaaactctgttgggcatgtcccttaggaatctatcctaaggttttatgcactgcctctgggtccactattgatggtcgacgtggcc

SEQ ID NO: 475 - DNA, 574 bp, Homo sapiens
  misc_feature 57, 69, 97, 194, 211, 258, 290, 318, 328, 345, 358, 369,415, 496, 512, 542, 557, 571: n = A,T,C or G
tgggccctctagatgcatgctcgagcggccgcccttttttttttttttttttttttngcatattcttanatttttacatttttattttaaaacaganaatttcatattgattaacacctactactaaacagaatgatgcattaattaaatgccttgtcctaactgttataagctctgttagaaaaataaacatntcaccacaaactacagngtcagctctttaataaatacataaaacagaagttagtagtcaatcanagttatatgaacaggttcatagtatattatgngaaagtatcatattctccaatattctgnatcatttaanacaatttaagttacgtntaattcaaagccngaaataataanaaatatgttcagggataatttgcttctttcttaaagctattttatnttcaaatatttaatttaaaaatatattctatattaaatttatttttacaaacgcagtattcgttaggggaaacaaaataangtttttatgttactgntaagtttaatacatttctaatttttttcanaagttcaagaaaccntaatgaagtagctnatg

SEQ ID NO: 476 - DNA, 62 bp, Homo sapiens
  misc_feature 27: n = A,T,C or G
gccgcagctggggcgatccacgggacnggcccggctcgcgtccagagtcgccgccgccgccg

SEQ ID NO: 477 - DNA, 597 bp, Homo sapiens
  misc_feature 29, 81, 98, 181, 207, 220, 247, 279, 298, 308, 345, 352,365, 375, 382, 394, 544, 577: n = A,T,C or G
ctcactatagggcgaattgggccctctanatgcatgctcgagcggccgccctttttttttttttttttttttttttttttngagaaggagtctcgctntgttgccaggctggagtgcagtggcacgatctcagctcactgcaacctccacctcccgggttcaagcgattctcctgcctcancctccaaagtagctgaaactgtaggngcatgccaccacncccagctaatttttgtatttttagtanagacggggtttcaccatgttggccaggatggncttgatctcttgactttgngatcttcccnccttggcctcccgaagtgctgggattacaggcatganccaccgngcccggccttcantgagcatttnttttganaatcatgtcagnggtcaaaaaatgttggattttggagcatttcaaattttggattttaggatttgggatactcaatctgtagtactataatttgcccttaaaaatttgtcaggagtttaaatctcatgttattttctgactatagttaaaaaagtgaaaganatttgggggaaacattaaattttttccataagnggaaattcttatcaatggcc

SEQ ID NO: 478 - DNA, 549 bp, Homo sapiens
  misc_feature 36, 497: n = A,T,C or G
tatacgactcactatagggcgaattgggccctctanatgcatgctcgagctccttggcgagcacgtgaccccggcgggcacgcaggagggcaggcaggcccctgcgcaggcgctgggtggactgcttccaggtgtcatattggaagaacttgcccacggggtatctggggaagttgtccggaagcacggtcggaggggtcgacacgtccctctcggacttggcgggggtagcacagtacgtctccaggagggccaggtcacagctgcggaaacagcactcctcaacgatgccacggctgcgacggctcacacggcttgcgggcctgctgaagtagaagccgcggtccccacagacgaactggagggtgtccaccagctccccgccgcacagggtctcactggggcggtaagcagcaatgcagcacgaggcgaaggccaagaaggtgagaagcaccagcatcgacttccccattgggattcccattggtgtagctcancagaaggctcgctggggcaggaggaggaggaggaagaggaggaggaggaagc

SEQ ID NO: 479 - DNA, 411 bp, Homo sapiens
gatgcatgctcgagtggcagatatactaacgcaacttttgcagacagatgactctgcagaatttaacctagtgaacaatgccctattaagtatatttaaaatggatgcaaaagggactttaggtgggttgttcagccaaatacttcaaggagaggacattgttagagaacgagcaattaaattcctttctacaaaacttaagactttaccagatgaagtcttaacaaaggaagtggaagagcttatactaactgaatccaaaaaggtcctagaagatgtgactggtgaagaatttgttctatttatgaagatactgtctgggttaaaaagcttacagacagtgagtggaagacagcaacttgtagagttggtggctgaacaggccgacctagaacagaccttcaatccctc

SEQ ID NO: 480 - DNA, 554 bp, Homo sapiens
  misc_feature 214, 262, 310, 391, 445, 455, 470, 477, 508: n = A,T,C or G
gggccctctagatgcatgctcgagcggccgccctttttttttttttttgagatggagtcttgctctgttgccagactggagtgcagtggtgcgatctgggctcactgcaatctccacctcccgggttcaagcgattctcctgcctcagcctcccgagtaactgggactacaggtgcgcgccaccaagcccagctcatttttgtatttttagtanagatggggtttcacgatgttggctaggatggtctcgatctctggtcanagtcttttctgtaaatatccttggtaaagaagcaattttagactgtanctgttgcaaatgctttaaggaagaagcaaaacaactgtcagtcttcctgaaatgaagaaactacaccagggctgctatatnagagcaaccccaaccagcactccaatcatgatgccgacagtggccccagctganagaccagganaagttccagatgcanagactgngatgctcttgactatggaattattgcggccngtagccaagttagagacaaaacaggcataggtcccgttattatttg

SEQ ID NO: 481 - DNA, 625 bp, Homo sapiens
gggcgaatgggccctctacatgcatgctcgagcggccgcagccatgtcccgggggcccgaggaggtgaaccggctcacggagagcacctaccggaatgttatggaacagttcaatcctgggctgcgaaatttaataaacctggggaaaaattatgagaaagctgtaaacgctatgatcctggcaggaaaagcctactacgatggagtggccaagatcggtgagattgccactgggtcccccgtgtcaactgaactgggacatgtcctcatagagatttcaagtacccacaagaaactcaacgagagtcttgatgaaaattttaaaaaattccacaaagagattatccatgagctggagaagaagatagaacttgacgtgaaatatatgaacgcaactctaaaaagataccaaacagaacacaagaataaattagagtctttggagaaatcccaagctgagttgaagaagatcagaaggaaaagccaaggaagccgaaacgcactcaaatatgaacacaaagaaattgagtatgtggagaccgttacttctcgtcagagtgaaatccagaaattcattgcagatggttgcaaagaggctctgcttgaagagaagaggcgcttctgc

SEQ ID NO: 482 - DNA, 597 bp, Homo sapiens
  misc_feature 108, 170, 400, 403, 433, 476, 506: n = A,T,C or G
ctatagggcgaattgggccctctacatgcatgctcgagcggccgccctttttttttttttttttttttttaagcaaaccaaagaactttatttggagtaatagctaanaaaacagctttttatggaaactgaaaaagagagcagaggaagtataagagctaccccttaanaaataactttaatagttaaaaaactttcgtagaatcttactaaaaaggaggcaacattagtttaaaaaataactgaacaagaatctggcctaataaccagacctcggattagcatactttctagttatagatgtaaatcttcaaagtacatatattcagtacaagtcaaaaaaaaataaaataaaatagtgccagaccatcctttactttttcatgtccttgaaaatganaanagtaatgtacttaagtaattccttcttaanaatgtcccttaaactataacaacttcatagcatcttgacttanaatataccacattttccaagtcctatttgnctatttatattcattatatataagtaaccatgacaacagaattgaagttccgcttaaaagactcttgccctttccaacttttactttaagt

SEQ ID NO: 483 - DNA, 578 bp, Homo sapiens
  misc_feature 497, 501: n = A,T,C or G
gcatgctcgagagagctacctttttccttttatgtataaggacacagctagaaaatgccatgtatgatccagaggcctaatttgttgatcccttaatcttggacttcccaccattgagaacagcgagaaataaatttctgttgtttataagctgccaagttcatagtatttcattacagcagcctgcacagaccaaggcagtatttttttttaatgtcttctaagggaacccccccaaaagtaaacaaaaatctacaaaagttatttgtatgatcaaaatcaaaacattcttattcacgaaatagaagctacagtaaattttcaaaaaataagagttaaaaaactccccccatatgatatattttacagtttcacaagggtaccaggtcgtgaaggaattttattaaatctattaaatcatagatagcttttaataagttcaattttactttaagagctaataagttacttgatattaacctttttacttataaggnaagngggagatatgacatcataatcttagacatttaaaaaatcctgagaaagattatttcaatcttttacagtttgggatc

SEQ ID NO: 484 - DNA, 585 bp, Homo sapiens
ctttttttttttttttactttgacaacaaattatattttaaatgtttcatatttacttttatatttccatacaatcagaaacagtaaaaaaaatttggagagcacataaaaacatcttaaagttaaaaatataaagccttgtatttaaaaatgcagtcatttaaataatattataagaatctatttgtacataataaacaagtttcaaccagcaagaaattactaatattgactgtggagttttggctgttttaatagttctaactcattattccgtaattcaacacagcactaccaacacagctggcaatgacaagactgggagtatcaaactaggattgttagttcaattaaaatttcagataaacaataatgtacttatactaaaaaattatttgttgtatatctgaaatgaaaatttaactgggtacccaattgtttgtttgtttaatctaaaaaccctgattgaaatttatctaataaaacatcatttaatatctaaaataaaataaatttactataacatctttataactattcaatcaatgattcatcttctatttttccaaattcttgcacaaatat

SEQ ID NO: 485 - DNA, 495 bp, Homo sapiens
  misc_feature 64, 105, 215, 248, 261, 268, 279, 306, 311, 313, 371, 376,381, 409, 416, 432, 433, 448, 456, 461, 472, 494: n = A,T,C or G
ctttttttttttttttttttttttttttttatttttaaaactttattttaaaaatatgagcatntattttaaaagttttgataattattgccattattttcttgngattggtacaatttaaaaataagtctatgttttcacattgattttaaaaaatatagcatgtttgaattacaaatgattaagcaaactctattacttcatagctgaccatnttccaaaaaattcccacttaattgaatacttanaaaaaaatggccngtggccnattgaaaggtntattaaaattaagggcagttttaattntgaananaaatatcttcatggaaatctatttgtaagcttctgaaattgctgctgaaagtctacantctgngaatntaccaattcccctttacaactgatgcanatcattntgaaatactggaaggnntaccctacaatttangaattggngtggntgccactgctntgctctcaattgcacactcatna

SEQ ID NO: 486 - DNA, 594 bp, Homo sapiens
gtcgacttttttttttttactttgacaacaaattatattttaaatgtttcatatttacttttatatttccatacaatcagaaacagtaaaaaaaatttggagagcacataaaaacatcttaaagttaaaaatataaagccttgtatttaaaaatgcagtcatttaaataatattataagaatctatttgtacataataaacaagtttcaaccagcaagaaattactaatattgactgtggagttttggctgttttaatagttctaactcattattccgtaattcaacacagcactaccaacacagctggcaatgacaagactgggagtatcaaactaggattgttagttcaattaaaatttcagataaacaataatgtacttatactaaaaaattatttgttgtttatctgaaatgaaaatttaactgggtacccaattgtttgtttgtttaatctaaaaaccctgattgaaatttatctaataaaacatcatttaatatctaaaataaaataaatttactataacatctttataactattcaatcaatgattcatcttctatttttccaaattcttgcacaaatatttgatgc

SEQ ID NO: 487 - DNA, 543 bp, Homo sapiens
  misc_feature 74, 137, 173, 184, 200, 222, 257, 302, 352, 356, 372, 376,388, 409, 439, 442, 457, 467, 488: n = A,T,C or G
attgggccctctagatgcatgctcgagcggccgcccttttttttttttttttttttttttttttttacactcanattgtttatttaaaaatgcccaaaacacaaaaatagacttttaaggtaataatatatattacnaaatatattatagtctacttataataattatatcgncgttttcaatnttacaaaaaaaggaanaaaaatacaagggaagcagacnacccaatatatataaatactataaaatcatattanaataaataaagtcgtcataaataaagggcccattgatttatgggnggggtttggcaacggctttggctacttgcttttggagggtaatttgagcnccangattccccctcagganaggntccagttaccangaaacactggaacctcaggtntataaaaactggaggggcagtgaaggcctnttnttcacagcacataanattctagganacaaatttgggcagggaaaangtgggggaaagggttcattgcctcccttaaatatgctacaattttttttccccca

SEQ ID NO: 488 - DNA, 643 bp, Homo sapiens
tgggccctctacatgcatgctcgagcggccgcgtcgacgcctgtacccaacccaggagagtggctgcaatgagtgtggctcagagagttgctgatgagatggatgtgatgttgggccaggaagttggttactccattcgatttgaagactgcagtagtgcaaaaaccattcttaagtatatgactgatgggatgttacttcgtgaagctatgaatgatcccctcctggagcgttatggtgtaataattcttgatgaggctcatgagaggacactggctacagatattctaatgggtgttctgaaggaagttgtaagacagagatcagatttaaaggttatagttatgagcgctactctagatgcaggaaaattccagatttactttgataactgtcctctcctaactattcctgggcgtacacatcctgttgagatcttctatactccagaaccagagagagattatcttgaagcagcaattcgaacagttatccagattcatatgtgtgaagaggaagagggagatcttcttcttttcttaactggtcaagaggaaattgatgaagcctgtaagagaataaagcgtgaagttgatgatttgggccctgaagttggtgacattaaaatcattccattgtattc

SEQ ID NO: 489 - DNA, 608 bp, Homo sapiens
cttttttttttttttttttacattttttggttcattctgtatcaatgagcagttgtgatatgacagttatgtgtgaattcatctataacagtggattttggggaaatgaataggccaaaaaggaagatattctccaaaactcttaaaatttaaaggttgcagtaggatgctactccagctaattttaagctagccctcctgtattcttacagttatttctctctctctttctttcacacacatgtactcattttcttattctattttataacaatttccccttatgctgacttcgaaaacttattatcttaaaaaatcttattgcatgcattcctgtaagcagctacctcaaacgctttttgagccaggctgaaaataaataaagccaaatttaaaaaaacaaaaacaaaaaacactccaaatcttgccaaactgatgaatcaaatgttttttgattgtattttctttaacctttatctatatgaatacataatttacacatatttatagtcaaggtgtttgggtaaaagaacaaaaaatgatttatcctctttcaaagaaaaggactacaaaaggactgaaaaatactttgggaggccccaggtcca

SEQ ID NO: 490 - DNA, 164 bp, Homo sapiens
  misc_feature 130, 138: n = A,T,C or G
ctgagttctttctgttcataaaattatgatcttatgacagctgtaacttttaattaataatattaacaaatcattattgatataggcttttcaatttgctcaagattaggaattgtaagtggaatgaagnagcacttncagttgacaaatggatccgagctcgg

SEQ ID NO: 491 - DNA, 624 bp, Homo sapiens
  misc_feature 38, 47, 155, 204, 302, 327, 334, 342, 355, 375, 407, 487,490, 497, 555, 564: n = A,T,C or G
gtcgactttttttttttttttttttttttttttttttnatttaaaanatttttatttctccaaatttgttatttatcaggagtgactgaaataaaaaatacaattgagtcccatcatcatcatcatggaaatggctttaaaagaaaactggtcanatgaatattattgcttcccattttcaaccagtaaatagttgccactganaaactgacagccaggagtctgtcaagaatgctcaagatatgttatttaatacaacatgcctgttcacagggggaaaaatcctaggaaataacttatgngtacttcttgatttcatcatacaanacaagcncaaaagcnccacccatgcctntgaaaacattggaccatgcncccttgaaaaaagctttgcctccttcatcacnagcaatcttccgccagcagtcaagcgtgcctgtgtacatgatgtcagttcctttgcgccctgactgcatcatcatgcggnggngaacggngtcaaatggataggaagtcaacccggcaacagcagtgacagtctgtgcgatcatccanctgatgacnatgtgagtgttcttgggatccgagctcggtaccaagcttggcgtaatcatgggcatagct

SEQ ID NO: 492 - DNA, 529 bp, Homo sapiens
  misc_feature 2, 34, 267, 294, 396: n = A,T,C or G
cnactcactatagggcgaattgggccctctagcngcatgctcgagcggccgcccttttttttttttttttttttttatttttaaaactttattttaaaaatatgagcatctattttaaaagttttgataattattgccattattttcttgtgattggtacaatttaaaaataagtctatgttttcacattgattttaaaaaatatagcatgtttgaattacaaatgattaagcaaactctattacttcatagctgaccatcttccanaaaattcccacttaattgaatacttanaaaaaaatggccagtggccgattgaaaggtatattaaaattaagggcagttttaattctgaagacaaatatcttcatggaaatctatttgtaagcttctganattgctgctgaaagtctacagtctgtgaatataccaattcccctttacaactgatgcagatcattatgaaatactggaaggcataccctacaatttaggaattggtgtggctgccactgctatgctctcaatt

SEQ ID NO: 493 - DNA, 566 bp, Homo sapiens
cttttttttttttttttttttagagaaaattcacagcattttattcaagttaatcaatttcattcaataatctgccatattgttcccagcaccactattactgttattatttctctttgaggaagaccaggtattaagaaatctggtttgaatttccatgatgcctaactctatggttaaaaatccttttccttaccaaaaaggaacttcttaatcaccagagaaacagagggaagactgagatatgtttgcagaaatttatctctactagagacaattcatagttcataatctttcagggttgtgctttacttgggggctccgttttcgggagcgggttgtttcccataaatgtttgcttaatacaaataatttgccccactgtaccacagaagggaaatgagggctagtgtccccagaaagcaagcaggcagtcctccagggaagaagccctaatggctcctagtggtgacagagtcattctgcctccccagcctgtgagcaataataaagtataactaagtgaacaggagaggtaataactagccagataacccatgggctag

SEQ ID NO: 494 - DNA, 513 bp, Homo sapiens
  misc_feature 32, 299, 371, 374, 416, 428, 437, 439, 442, 443, 466: n = A,T,C or G
cgactcactatagggcgaattgggccctctancatgcatgctcgagcggccgcccttttttttttttttttgaagtaattatttaatgacacaggaaaataacatgttatgaaacaagctggttacaagtagtaggtagatgacttaatttttgataaaaaaattaaaaagcataaacatgcatataaaaattagattatgtacaaaataccaacagtatttacttctgctcagtaattaaatattcttccctttgtttttgtcttttaaaaaacattatttctgaaaaaaaaaatcanaaaaacatgatcgtggagagaattattaaacaccaggaattaggaacccaagaagctaagccaggagctcancantcaaggttggaagtccaggacaggtccgaccagggtgatggnggccaagcccanaaatggaanantgnncttttcttttcctactggaatgntctttaccagttttctctatattcgatgttagcacacttatttaatg

SEQ ID NO: 495 - DNA, 642 bp, Homo sapiens
  misc_feature 500, 562: n = A,T,C or G
cttttttttttttttttttttaggttattaaataatttgtttattgtacggcatttacaaagaaaacagacaatgccctcagtagaaagaataaaaatgtatttagggctttatttttaactgacagcaaatagaaatcctttagtgagatcgtggcaatttgacagtattataattaagctcaataaaggtacatggggtacctggaagatcaagatctacagctgcctatttccacatctttcaatccatctggctccttaaataggggaaaaagcccttatttggtggagaagcatttccaaaatgaagttacaggttctattaaaacttactgtcacatcaactgttaaaatagggccttttgtgttttgttatttcaccttaatatcaccagaattcctgtaattccacaattgtgattttactatgtagaagataattcagttctagtctattgctttagatgtaaaaacagctgaaaacccaaagtggattanaattgctgaaggatttccctgccgttgtttgatacaatctattctcttgattcttgataggngcatagaaagcctaacttaaaattctttctacaggaacatgtctgatttcaggagtacccaatgaaggatccgagctcgg

SEQ ID NO: 496 - DNA, 547 bp, Homo sapiens
  misc_feature 33: n = A,T,C or G
gactcactatagggcgaattgggccctctagcngcatgctcgaggtaacagaggtgaaagaggatctgagggctccccaggccacccagggcaaccaggccctcctggacctcctggtgcccctggtccttgctgtggtggtgttggagccgctgccattgctgggattggaggtgaaaaagctggcggttttgccccgtattatggagatgaaccaatggatttcaaaatcaacaccgatgagattatgacttcactcaagtctgttaatggacaaatagaaagcctcattagtcctgatggttctcgtaaaaaccccgctagaaactgcagagacctgaaattctgccatcctgaactcaagagtggagaatactgggttgaccctaaccaaggatgcaaattggatgctatcaaggtattctgtaatatggaaactggggaaacatgcataagtgccaatcctttgaatgttccacggaaacactggtggacagattctagtgctgagaaaaacacgtttggtttggagagtccatggatggtg

SEQ ID NO: 497 - DNA, 510 bp, Homo sapiens
  misc_feature 79, 230, 240, 258, 267, 281, 299, 337, 363, 380, 382, 383,395, 401, 429, 436, 460, 465, 506: n = A,T,C or G
ctatagggcgaattgggccctctagatgcatgctcgagcggccgcccttttttttttttttttagttatagagctaatnggcttttatttgtgatttatgaattaaagcagcaccactctacaagtacagtgatagctccccctgggcaatacaatacaagaacagtgggttttgtcaaattggaacaaggaaacagaaccacagaaataaatacattggttaacatcanattagttcangttacctttttgtaaaanttaaagtanaggggacttctgtnttatgctaactcaagtanactggaatctcctgtgttctttttttttttaaattggntttaattttttttaattggatctatnttcttccttaacatttnanntggagtatgtancatttnacaccactggctcaatgcgctcacctangtgagantgtgaccaaatcttaaagcattantgctnttatcagttaccaccatttggggcttttatccttcatgggntatg

SEQ ID NO: 498 - DNA, 354 bp, Homo sapiens
  misc_feature 53, 74, 178, 184, 249, 281, 335, 340: n = A,T,C or G
gcatgctcgagcggccgccctttttttttttttttttttttttttttttttanagctaattggcttttatttgngatttatgaattaaagcagcaccactctacaagtacagtgatagctccccctgggcaatacaatacaagaacagtgggttttgtcaaattggaacaaggaaacngaaccncagaaataaatacattggttaacatcaaattaattcaggttacttttttgtaaaagttaaagtanaggggacttctgtattatgctaactcaagtanactggaatctcctgtgttctttttttttttaaattgggtttaattttttttaantgganctatcttcttcctt

SEQ ID NO: 499 - DNA, 254 bp, Homo sapiens
gactcactatagggcgaattgggccctctacatgcatgctcgagataaaaccatcaagctatggaataccctgggtgtgtgcaaatacactgtccaggatgagagccactcagagtgggtgtcttgtgtccgcttctcgcccaacagcagcaaccctatcatcgtctcctgtggctgggacaagctggtcaaggtatggaacctggctaactgcaagctgaagaccaaccacattggccacacaggctatctga

SEQ ID NO: 500 - DNA, 157 bp, Homo sapiens
gcatgctcgagcggccgcccttttttttttttttttactttgacaacaaattatattttaaatgtttcatatttacttttatatttccatacaatcagaaacagtaaaaaaaatttggagagcacataaaaacatcttaaagttaaaatataagcct

SEQ ID NO: 501 - DNA, 237 bp, Homo sapiens
  misc_feature 68: n = A,T,C or G
ttgggccctctagcatgcatgctcgagataaaaccatcaagctatggaataccctgggtgtgtgcaantacactgtccaggatgagagccactcagagtgggtgtcttgtgtccgcttctcgcccaacagcagcaaccctatcatcgtctcctgtggctgggacaagctggtcaaggtatggaacctggctaactgcaagctgaagaccaaccacattggccacacaggctatctga

SEQ ID NO: 502 - DNA, 439 bp, Homo sapiens
  misc_feature 36, 39, 191, 193, 291, 321: n = A,T,C or G
cgccccctcccctttttttttctgtgatggagtctnacntttgttgcccaagctggagtgcagtggcacgatctctgcttactgcaacctccgcccgccgggttcaagcaattctccttcctcagcttcccaagtagctgggactacaggtgcatgccactacgcccggctaaatttttgtattttagtananacggggtttcaccatgttgcccaggctggtctcgaactcctgaggtcaggcaatctgcccgccttggtcttccaaagtgctgggattagaggcatganacactgtgcccagccaatttaaacattttntaattgacaaatggttgagttcacaattgtctgaagacctgggatcaataggaagcacatgttcaggttaagataaaagattataatacttcaaaaggttcttttgaagtcttataat

SEQ ID NO: 503 - DNA, 606 bp, Homo sapiens
  misc_feature 26: n = A,T,C or G
ctatagggcgaattgggccctctagntgcatgctcgagtcggccagctggatctcccacaaggtttccttgttaaaagggtgcttaagtaacctggccggcagcacgacttatgatgaagcacgaagaagccaggttctgtgtcgatcactctctcagtcccctcaactgctcatcttaaactatttggttcctgacacgtttccaaaaggggaaaggggaaaaggggaaggggggaaggggaacataaaaagtatttgttacatttaaaaagggggggaaggggaaagagctgtatctatgttcacctcattcaacttccttgagttatggcactatgatgttgcttaattaggtaagacatggatatttgcaccgagtgcaaatactgttcataacaaggtcatagctagaaagacagatgggctcaagtgtggacaaataatgtcatcaaggtaatagatcaaaaatattaaagccctataaaagatctgagcagtcaactccaaaacatccacatgacaaagtccttaaaatacaaatctcattactcttactcatgcaactgctaaaaaatagtgtgcagatatgtatttatatttgcctt

SEQ ID NO: 504 - DNA, 690 bp, Homo sapiens
  misc_feature 6, 7: n = A,T,C or G
tatacnnctcactatagggcgaattgggccctctagatgcatgctcgagaagcctttcaggctttggaaaaattgaataatagacagctcaactatgtgcagttggaaatagatataaaaaatgaaattataattttggccaacacaacaaatacagaactgaaagatttgccaaagaggattcccaaggattcagctcgttaccatttctttctgtataaacattcccatgaaggagactatttagagtccatagtttttatttattcaatgcctggatacacatgcagtataagagagcggatgctgtattctagctgcaagagccgtctgctagaaattgtagaaagacaactacaaatggatgtaattagaaagatcgagatagacaatggggatgagttgactgcagacttcctttatgaagaagtacatcccaagcagcatgcacacaagcaaagttttgcaaaaccaaaaggtcctgcaggaaaaagaggaattcgaagactaattaggggcccagcggaaactgaagctactactgattaaagtcatcacattaaacattgtaatactagttttttaaaagtccagcttttagtacaggagaactgaaatcattccatgttgatataaagtaggaaaaaaaattgtactttttggaaaatagcacttttcacttctgtgtgt

SEQ ID NO: 505 - DNA, 594 bp, Homo sapiens
ctttttttttttttttactttgacaacaaattatattttaaatgtttcatatttacttttatatttccatacaatcagaaacagtaaaaaaaatttggagagcacataaaaacatcttaaagttaaaaatataaagccttgtatttaaaaatgcagtcatttaaataatattataagaatctatttgtacataataaacaagtttcaaccagcaagaaattactaatattgactgtggagttttggctgttttaatagttctaactcattattccgtaattcaacacagcactaccaacacagctggcaatgacaagactgggagtatcaaactaggattgttagttcaattaaaatttcagataaacaataatgtacttatactaaaaaattatttgttgtttatctgaaatgaaaatttaactgggtacccaattgtttgtttgtttaatctaaaaaccctgattgaaatttatctaataaaacatcatttaatatctaaaataaaataaatttactataacatctttataactattcaatcaatgattcatcttctatttttccaaattcttgcacaaatatttgatgctt

SEQ ID NO: 506 - DNA, 560 bp, Homo sapiens
  misc_feature 182, 552: n = A,T,C or G
cttttttttttttttttgggtaccaaatttctttatttgaaggaatggtacaaatcaaagaacttaagtggatgttttggtacaacttatagaaaaggtaaaggaaaccccaacatgcatgcactgccttggtgaccagggaagtcaccccacggctatggggaaattagcccgaggcttanctttcattatcactgtctcccagggtgtgcttgtcaaagagatattccgccaagccagattcgggcgctcccatcttgcgcaagttggtcacgtggtcacccaattctttgatggctttcacctgctcattcaggtaatgtgtctcaatgaagtcacacaaatgggggtcatttttgtcagtggccagtttgtgcagttccagtagtgactgattcacatttttttccaaatgtaatgcacactccattgcattcagcccgctctcccagtcatcacagtctggtttcttgatatcctgaaggaagattcggccacctcgttggttctgcagcttcatcagtttctcagcatgttccctctcctcatganattggtga

SEQ ID NO: 507 - DNA, 436 bp, Homo sapiens
  misc_feature 6, 10, 12, 40, 163, 182, 284, 319, 383, 385, 391, 404, 414: n = A,T,C or G
ccaacntgananaacttaactgttctcttgtctggtcaanattgaggcagtgtatctagttggcaatatctgttttaggagtattcctaaatgcaaatatttagctgagtattatttgttaagataatctagtgaacagcaatgtttaggacctatctataanagcctgggtcaagatgaanaggcacaatatggtttgctctctaaacggacttaaaaatccctgatacctttcctcctttcctagttatagtctgttcatccctaagttaagggtagcacanaggaaaacctttctgacaggaaaaaggtaaagcanaaaaatcactttcatcaatccaaactggtaactgacatttagcatggaatcaattccaaaactntnaacctnttccagcatgcanaccaaccctnggccctggcactaaggtggagt

SEQ ID NO: 508 - DNA, 647 bp, Homo sapiens
  misc_feature 193, 230, 262, 383, 385, 394, 397, 498, 524, 526, 576, 599,611, 617, 636: n = A,T,C or G
ctttttttttttttttttttttttttagttatagagctaattggcttttatttgtgatttatgaattaaagcagcaccactctacaagtacagtgatagctccccctgggcaatacaatacaagaacagtgggttttgtcaaattggaacaaggaaacagaaccacagaaataaatacattggttaacatcanattagttcaggttacttttttgtaaaagttaaagtanaggggacttctgtattatgctaactcaagtanactggaatctcctgtgttctttttttttttaaattggttttaattttttttaattggatctatcttcttccttaacatttcagttggagtatgtagcatttagcaccactggctcaatgcncncacctaggnganagtgtgaccaaatcttaaagcattagtgctattatcagttaccaccatttggggcttttatccttcatgggttatgatgttctcctgatgacacatttctntgagttttgtaattccagccaaagananaccattcactatttgatggctggctgcatgcaaacatttaaagcttttanagaatacactacaccagggagtntgactactagtntgactnttaggagggtaataccaanagttggactac

SEQ ID NO: 509 - DNA, 638 bp, Homo sapiens
gtatacgactcactatagggcgaattgggccctctagatgcatgctcgaggtgaagttttaaaaaaaaagttgtggaaaggaaagttccaaagaggtggtttctgaggaagtcagagcgcccagggccagagcagtcagtaatgggtgaatgaggttgtttggaaagtcggtgtgacagacacatggatgccatctacttctaggttgctggtgggtattaaatatgcacaatattccatagctcactgaggattttaaaattataagcataggattttatattttggggtgaaagaattatctggcacattaggtattggagtttaaaaaaaaagccaaatttcacagtcttaataactttttttaaaaaaaactaaaaggcgcttcatgtccagtgtgtggcccttctgaaacttatggtcatctctcccactgaaaccaaggtcttttcaaatgtggctaaatggggatgaggagacacgggtaggactttcttggtgtgtgtgcattctttaaagagccaagttgcttcggggaaacagccaggaaaatggtcaagattatttttagaggttattttattggggattttaagaactaataacatcttgagttatttttaattcagggggatgtg

SEQ ID NO: 510 - DNA, 551 bp, Homo sapiens
  misc_feature 61, 63, 504, 505, 543: n = A,T,C or G
ccctctagatgcatgctcgagcggccgcggctccagggaacggccgcgcatcggcgccccngntgcttctgctctttctggttccgctgctgtgggccccggctgcggtccgggccggcccagatgaagaccttagccaccggaacaaagaaccgccggcgccggcccagcagctgcagccgcagcctgtggctgtgcagggccccgagccggcccgggtcgagaaaatatttacaccagcagctccagttcataccaataaagaagatcctgctacccaaactaatttgggatttatccatgcatttgtcgctgccatatcagttattattgtatctgaattgggtgataagacattttttatagcagccatcatggcaatgcgctataaccgcctgaccgtgctggctggtgcaatgcttgccttgggactaatgacatgcttgtcagttttgtttggctatgccaccacagtcatccccagggtctatacatactatgttnnaactgtattatttgccatttttggcattaaaatgcttngggaaggc

SEQ ID NO: 511 - DNA, 206 bp, Homo sapiens
  misc_feature 57: n = A,T,C or G
gcatgctcgagcggccgccctttttttttttttttgtttttttttttttggctctanagggggtagagggggtgctatagggtaaatacgggccctatttcaaagatttttaggggaattaattctaggacgatgggcatgaaactgtggtttgctccacagatttcagagcattgaccgtagtataccccggtcgtgtagcggtg

SEQ ID NO: 512 - DNA, 130 bp, Homo sapiens
  misc_feature 36, 52: n = A,T,C or G
gcatgctcgagagagctacctttttccttttatgtntaaggacacagctagnaaatgccatgtatgatccagaggcctaatttgttgatcccttaatcttggacttcccaccattgagaacagcgagaaa

SEQ ID NO: 513 - DNA, 531 bp, Homo sapiens
  misc_feature 517: n = A,T,C or G
cttttttttttttttttttagttatagagctaattggcttttatttgtgatttatgaattaaagcagcaccactctacaagtacagtgatagctccccctgggcaatacaatacaagaacagtgggttttgtcaaattggaacaaggaaacagaaccacagaaataaatacattggttaacatcagattagttcaggttacttttttgtaaaagttaaagtagaggggacttctgtattatgctaactcaagtagactggaatctcctgtgttctttttttttttaaattggttttaattttttttaattggatctatcttcttccttaacatttcagttggagtatgtagcatttagcaccactggctcaatgcgctcacctaggtgagagtgtgaccaaatcttaaagcattagtgctattatcagttaccaccatttggggcttttatccttcatgggttatgatgttctcctgatgacacatttctctgagttttgtaattccagccaaaganagaccattcactat

SEQ ID NO: 514 - DNA, 225 bp, Homo sapiens
attgggccctctacatgcatgctcgagaggcggagaggatcatgtccgggaactgcggggtagtagcgatctgggttacccagccgttgtggcccttgagggtgccacgaagggtcatctgctcagtcatggcggcggcgagagcgtgtgtcgctgcagcgacgaggatggcactggatggcttagagaaactagcaccacaacctctcctgcgtcgacgcggcc

SEQ ID NO: 515 - DNA, 102 bp, Homo sapiens
agcacgacttatgatgaagcacgaagaagccaggttctgtgtcgatcactctctcagtcccctcaactgctcatcttaaactatttggttcctgacacgttt

SEQ ID NO: 516 - DNA, 561 bp, Homo sapiens
  misc_feature 253, 515: n = A,T,C or G
cttttttttttttttttttttatagagctaattggcttttatttgtgatttatgaattaaagcagcaccactctacaagtacagtgatagctccccctgggcaatacaatacaagaacagtgggttttgtcaaattggaacaaggaaacagaaccacagaaataaatacattggttaacatcagattagttcaggttacttttttgtaaaagttaaagtagaggggacttctgtattatgctaactcaagtanactggaatctcctgtgttctttttttttttaaattggttttaattttttttaattggatctatcttcttccttaacatttcagttggagtatgtagcatttagcaccactggctcaatgcgctcacctaggtgagagtgtgaccaaatcttaaagcattagtgctattatcagttaccaccatttggggcttttatccttcatgggttatgatgttctcctgatgacacatttctctgagttttgtaattccagccaaaganagaccattcactatttgatggctggctgcatgcaaacatttaaagc

SEQ ID NO: 517 - DNA, 557 bp, Homo sapiens
  misc_feature 28, 29, 105, 327, 384, 390, 415, 432: n = A,T,C or G
cttttttttttttttttttgaagcttgnngctgctttattgaaacttcctccctgtcgcacacaaagcaattacacaagggggtattgccagggagcttttgcanagccttctccctctgtaccccccgacagtccccagagaccctgcctccgtggcctccacctctgggtcagctccctggaggaccccgacacacagggaagcaggcacaggagggctgttggggccaaacctccccagctgccacaaccgccatgaccccagtggcagggtcagtgcccacaagggggttgcctgctttgactgaactaacctgtgggtttantccaacgaacagatgtgcctgatttcagggctgaatttttgcttgaccacaagcctngggcanaacagattcgcctatgactgaatcnactgaatggatggccancgacagcctggcctgggaatggactggcagctcatcactaaaatgactcctttcatggaatccactgctatgcagccacactgaccacagagcaactgaataggtgagcattggattgttgatga

SEQ ID NO: 518 - DNA, 629 bp, Homo sapiens
  misc_feature 34: n = A,T,C or G
tacgactcactatagggcgaattgggccctctanatgcatgctcgagtctttaatataaccccaaatgaaagaaccaaggggaggggtgggatggcacttttttttgttggtcttgttttgttttgttttttggttggttggttcgttattttttaagattagccattctctgctgctatttccctacataatgtcaatttttaaccataattttgacatgattgagatgtacttgaggcttttttgttttaattgagaaaagactttgcaattttttttttaggatgagcctctcctagacttgacctagaatattacatattcctccagtaagtaatactgaagagcaaaagagaggcaggattggggtcacagccgcttcttcagcatggaccaagtgggccttggggattgcagcgttctcgaagtggctgtaggactcgaatttacagaaagccacagaggtgcaacttgaggctctgctagcaagccaccagtgaggctattgggtaaccacctttctatacaggagattggaatctactttgtcatttatccaccacagtgacaaaggaaaagtggtgccgttatgcaatccatttaactcataaacatattactctgagta

SEQ ID NO: 519 - DNA, 481 bp, Homo sapiens
gccctctacatgcatgctcgagcggccgccctttttttttttttttgctaatttgggacgttttatttattggaaaggttctttcaagggaacttttctgcaagaccaagcaatgtatgtatttttctttggtaaattacaagttacattggcacaaaaaacacatggtgactaatgtactttgctctaggacaattaaagaaaatgtattttatcctcacaaatccagtgaagccttcattttatttctaaaagtttaaggaaggtctagtctaccagttataaaaatgaaaaccagttcaactctaatataaacattatttacatttgtttataaaaatagatttgagtttaggaaaagttgaacaactagttatttttacttcagttattaggtacaatgaattccttgatttttcaaggctgaccctgtttccttggttaacaatttcaatttaggccttataggaaaaaacgtaag

SEQ ID NO: 520 - DNA, 609 bp, Homo sapiens
  misc_feature 514, 549: n = A,T,C or G
ctttttttttttttttagttatagagctaattggcttttatttgtgatttatgaattaaagcagcaccactctacaagtacagtgatagctccccctgggcaatacaatacaagaacagtgggttttgtcaaattggaacaaggaaacagaaccacagaaataaatacattggttaacatcagattagttcaggttacttttttgtaaaagttaaagtagaggggacttctgtattatgctaactcaagtagactggaatctcctgtgttctttttttttttaaattggttttaattttttttaattggatctatcttcttccttaacatttcagttggagtatgtagcatttagcaccactggctcaatgcgctcacctaggtgagagtgtgaccaaatcttaaagcattagtgctattatcagttaccaccatttggggcttttatccttcatgggttatgatgttctcctgatgacacatttctctgagttttgtaattccagccaaaganagaccattcactatttgatggctggctgcatgcanacatttaaagcttttagagaatacactacaccagggagtatgactactagtatgactatt

SEQ ID NO: 521 - DNA, 579 bp, Homo sapiens
  misc_feature 66, 67, 93, 184, 223, 229, 255, 275, 303, 309, 324, 348,365, 371, 425, 432, 438, 447, 450, 464, 486, 494, 497, 533: n = A,T,C or G
attgggccctctacatgcatgctcgagcggccgcccttttttttttttttttcacaaacactttanntcatttattaatgcagtatacattanatctaaaatctgcagtttctaagcaaaccatgtttagatctttcaaatccttctgcagttttaggttatttctacagaggtacctttaagngaatgaataccaaattctgtaattcctgaaaatatagtncagagngaaatgatttaaatataatttaggcncatattgattatgaaaatanattatctctcaatacaatacttctctgncttggnaaaaataataaagcnaagaaaataattcatttctgaagntgctttccttcacttgnaaaggnctgatctcctcccactatgcatatgtaccctttactgttaaggaaagctttgcntatgtanatatanaaaaataanctncgtaaatactaaanatatgtcattctcccaaagganacacaggnggntttcaatgattccttgcctcatgttgatgagtctgnaaaattcaaaacccatttggacacagctaatatccctgctcttggg

SEQ ID NO: 522 - DNA, 569 bp, Homo sapiens
  misc_feature 33, 123, 148, 268, 483, 523, 563: n = A,T,C or G
ctttttttttttttttttttttctttgaaaaancattttaagaaggcaaagttccaaacagggttacacaggagtctactcagtttcctggccatacaggattaacgctgtgccttacgttanagcaacaaacttgactgtccgtgtntatataggtgagggacaaagggtttctgcagccaagcactgcactccattccgctgcctgggcgggccttgagcaggaaggtccctcttgcaccacctcctccacttcagttcagctctntcatgtcttccaccaagaggacatggtctttttccacacagatcacatgggatggtgaatcttcttactcatgaaaaacagcccaaggtactgctaatttgggacgttttatttattggaaaggttctttcaagggaacttttctgcaagaccaagcaatgtatgtatttttctttggtaaattacaatttacattggcacaaaaaacacatggngactaatgtactttgctctaggacaattaaagaaaatgtnttttatcctcacaaatccagtgaagccttcattttatttntaaaag

SEQ ID NO: 523 - DNA, 452 bp, Homo sapiens
  misc_feature 122, 145, 318, 369, 385, 393, 400: n = A,T,C or G
gccctctacatgcatgctcgagcggccgccctttttttttttttttttgaaaaagtcatggaggccatggggttggcttgaaaccagctttggggggttcgattccttccttttttgtctanattttatgtatacgggttcttcnaatgtgtggtagggtggggggcatccatatagtcactccaggtttatggagggttcttctactattaggacttttcgcttcgaagcgaaggcttctcaaatcatgaaaattattaatattactgctgttagagaaatgaatgagcctacagatgataggatgtttcatgtggngtatgcatcggggtagtccgagtaacgtcggggcattccggataggccganaaagtgttgtgggaanaaagttanatttacnccgatgaatatgatagtgaaatggattttggcgtaggtttggtctagggtgt

SEQ ID NO: 524 - DNA, 585 bp, Homo sapiens
  misc_feature 34: n = A,T,C or G
tacgactcactatagggcgaattgggccctctanatgcatgctcgagcgacagagacaagctgagcttgccgcacaaaaagctagagaggtaacgctcggtcgtttggaaagtagagacagtccatggcaaaactttcagtgttgggttctgcctcctgctcagttcagaaagagatggaatacagactatctaattcctttctcgtctaaacttaacattgctgcgaaagttaattttttagcctattcagaagtgctgactgataacttaaaagttggaagcttttataaaacatattcaaggatactttttgatttaatggaactggctatttgagaagtgtttgaaacttttgccatggctgcaggacttacattcttttttgggaggacggtggggagacagggagtggtaaagggaaaaggttaaaaatccacctgtggttgtatattcttctattctgtcactctgttacctagactgtgagaggcttttgccttcagtcagattaaaaagagcagggcctaacattgagtgatagcacctgctttgataaataggttttctcactcttctttttttc

SEQ ID NO: 525 - DNA, 190 bp, Homo sapiens
gggccctctgctgcatgctcgagcggccgccctttttttttttttttgagagaaaagagtattaaatagaaataatatcagggaaaataaaagcctggtcccaaaataaaagggccattaattgaagagaacgattttactttttcttgacaataaacagcattatccctattattaggtcgacgcggcc

SEQ ID NO: 526 - DNA, 621 bp, Homo sapiens
  misc_feature 9, 563: n = A,T,C or G
gccctctanatgcatgctcgagtctttaatataaccccaaatgaaagaaccaaggggaggggtgggatggcacttttttttgttggtcttgttttgttttgttttttggttggttggttcgttattttttaagattagccattctctgctgctatttccctacataatgtcaatttttaaccataattttgacatgattgagatgtacttgaggcttttttgttttaattgagaaaagactttgcaattttttttttaggatgagcctctcctagacttgacctagaatattacatattcctccagtaagtaatactgaagagcaaaagagaggcaggattggggtcacagccgcttcttcagcatggaccaagtgggccttggggattgcagcgttctcgaagtggctgtaggactcgaatttacagaaagccacagaggtgcaacttgaggctctgctagcagccaccagtgaggctattgggtaaccacctttctatacaggagattggaatctactttgtcatttatccaccacagtgacaaaggaaaagtggtgccgntatgcaatccatttaactcataaacatattactctgagtaactggccagccattcatc

SEQ ID NO: 527 - DNA, 435 bp, Homo sapiens
ctttttttttttataaatagacttattttcctttgtaatgtattggccttttagtgagtaaggctgggcagagggtgcttacaaccttgactccctttctccctggacttgatctgctgtttcagaggctaggttgtttctgtgggtgccttatcagggctgggatacttctgattctggcttccttcctgccccaccctcccgaccccagtccccctgatcctgctagaggcatgtctccttgcgtgtctaaaggtccctcgtcctgtttgttttaggaatcctggtctcaggacctcatggaagaagagggggagagagttacaggttggacatgatgcacactatggggccccagcgacgtgtctggttgagctcagggaatatggttcttagccagtttcttggtgatatccagtggcacttgtaatggcg

SEQ ID NO: 528 - DNA, 593 bp, Homo sapiens
  misc_feature 32, 86: n = A,T,C or G
tacgactcactatagggcgaattgggccctcnagatgcatgctcgagaagtaattatcagttggtttggatttttggaccaccgtncagtcattttgggttgccgtgctcccaaaacattttaaatgaaagtattggcattcaaaaagacagcagacaaaatgaaagaaaatgagagcagaaagtaagcatttccagcctatctaatttctttagttttctatttgcctccagtgcagtccatttcctaatgtataccagcctactgtactatttaaaatgctcaatttcagcaccgatggccatgtaaataagatgatttaatgttgattttaatcctgtatataaaataaaaagtcacaatgagtttgggcatatttaatgatgattatggagccttagaggtctttaatcattggttcggctgcttttatgtagtttaggctggaaatggtttcacttgctctttgactgtcagcaagactgaagatggcttttcctggacagctagaaaacacaaaatcttgtaggtcattgcacctatctcagccataggtgcagtttgcttctacatgatgctaaaggctgcgaatg

SEQ ID NO: 529 - DNA, 504 bp, Homo sapiens
  misc_feature 50, 167, 264, 407, 444, 466, 479: n = A,T,C or G
gcatgctcgagcggccgccctttttttttttttttttctttgctcacatntaatttttattttgattttttttaatgctgcacaacacaatatttatttcatttgtttcttttatttcattttatttgtttgctgctgctgttttatttatttttactgaaagtganagggaacttttgtggccttttttcctttttctgtaggccgccttaagctttctaaatttggaacatctaagcaagctgaagggaaaagggggtttcncaaaatcactcgggggaagggaaaggttgctttgttaatcatgccctatggtgggtgattaactgcttgtacaattacgtttcacttttaattaattgtgcttaaggctttaattaaatttgggggttcccttcttagagcanctcgtactgacgaaggtgcatgcgctgaatgatgtcncggcagtcgttgaacacacggnggatgttctcagngtccacagcgcaggtgaaatgaggg

SEQ ID NO: 530 - DNA, 53 bp, Homo sapiens
atgcatgctcgagtcgtcatggctctgctcggccttccatctcttgtacctgt

SEQ ID NO: 531 - DNA, 630 bp, Homo sapiens
  misc_feature 495, 602: n = A,T,C or G
tacgactcactatagggcgaattgggccctctaagatgcatgctcgaggattaaacgagatgatatatgcgaaggcagggatttttgtctgttgtgttcagcactgtactcccagtgcctggaacagtgcctggtacacagtaggtgttcagtaagtacctgtaggaagaatgctgaatgcatgaggggccagccagagcagaacttgtggatgaggttggtaagcagagacagaaagggtggtggggctggagcgtgctaaaggatggtcacctccaccaaaggcaggagctgccactagacctcaagcggtgggtgccatgtgggaatgtcagctcagaggtgccacatcttccaatattttatgacaaaaaggaagtctagagttttatgtgaatttaattaagatttgaatgttggaattaatttgattttaaaagcagggcaattagaactaataaattcagcaaagttgaaggatacaaaatgaacacncaaaaattggttacatttctacaactaacaataaacaatccaaaaaggaaattaagaaaataattccatttacaatagcatcaaaaagaataaagtaccgaggaatnaacttaacaaaggttaaatattgtatgc

SEQ ID NO: 532 - DNA, 518 bp, Homo sapiens
  misc_feature 21, 256, 283, 385: n = A,T,C or G
tagggcgaattgggccctctnatgcatgctcgagcggccgcccttttttttttttttttgcagttatttttaaaactttattttaaaaatatgagcatctattttaaaagttttgataattattgccattattttcttgtgattggtacaatttaaaaataagtctatgttttcacattgattttaaaaaatatagcatgtttgaattacaaatgattaagcaaactctattacttcatagctgaccatcttccanaaaattcccacttaattgaatacttanaaaaaaatggccagtggccgattgaaaggtatattaaaattaagggcagttttaattctgaagacaaatatcttcatggaaatctatttgtaagcttctganattgctgctgaaagtctacagtctgtgaatataccaattcccctttacaactgatgcagatcattatgaaatactggaaggcataccctacaatttaggaattggtgtggctgccactgctatgctctcaatt

SEQ ID NO: 533 - DNA, 651 bp, Homo sapiens
tacgactcactatagggcgaattgggccctctacatgcatgctcgaggtggtggcagggccgccccctgcagtccggagacgaacgcacggaccgggcctccggaggcaggttcggctggaaggaaccgctctcgcttcgtcctacacttgcgcaaatgtctccgagcttactcacatagcatattggtatatcaaaatgaaatgcaaggaaccaaaaataacataattgaaggcagtaaaagtgaaattaaataggaagatcatcagtcaaggaagacccactggagaggacagaaaatgaagcagtgttttatcatgtgtatttcagcaggtcttcttgaaatttaactaaaaatatgactgctctctcttcagagaactgctcttttcagtaccagttacgtcaaacaaaccagcccctagatgttaactatctgctattcttgatcatacttgggaaaatattattaaatatccttacactaggaatgagaagaaaaaacacctgtcaaaattttatggaatatttttgcatttcactagcattcgttgatcttttacttttggtaaacatttccattatattgtatttcagggattttgtacttttaagcattaggttcactaaataccacatctgcctatttact

SEQ ID NO: 534 - DNA, 577 bp, Homo sapiens
  misc_feature 30, 478: n = A,T,C or G
cttttttttttttttttttgaaggtacaangggctccatattttacaaagtacaaaaaattatttcatatacaaagaaaaatacaaataatgtgcaaaaaccattttcacaggtggcaatttataaaatggaaatgatagaaaagtccttcattcttaattatccccaaatttcttatatattaacacagttctatttcctagtgtgtggacaattttaaatttgaaattctgatttatttttaatctacaaagtatttttattttttaaaagggaaccatttcattattgaaatcttatgaatgcatcagttaatttatattaaattataagcaggctatctgaaaaacaaggatatagaaatcatatatacacatttttgaaatattagtttagtatttaacatattaacatttcaaaacaaatgcaatgatctagctacctatgacgccagctggtgtcagtggttgtagcgaanatgctgtttctgtttaccatgagcaaacagcatttcttgggtcttaagctaaacaatcacaagttatcaaagtaaagaaaatctaaagacagttcttac

SEQ ID NO: 535 - DNA, 258 bp, Homo sapiens
  misc_feature 33: n = A,T,C or G
tacgactcactatagggccgaattgggccctcnagatgcatgctcgagataaaaccatcaagctatggaataccctgggtgtgtgcaaatacactgtccaggatgagagccactcagagtgggtgtcttgtgtccgcttctcgcccaacagcagcaaccctatcatcgtctcctgtggctgggacaagctggtcaaggtatggaacctggctaactgcaagctgaagaccaaccacattggccacacaggctatctga

SEQ ID NO: 536 - DNA, 564 bp, Homo sapiens
  misc_feature 8, 9, 87, 136, 159, 287, 418, 422, 435, 472, 528: n = A,T,C or G
gccctctnnatgcatgctcgagcggccgcccttttttttttttttttcatttgaagtaaaaatctttaatttgaacttatttaatanattattttaatttttgaacaagcataaaggtgccaatttaattatctgngggatttaaaaacttcaacaganaaagaaaataggaggtactagtgagaaatatattttacagtctacatatttattgtataataagctatattatattctaataacagcaaatataacattataatgattttgatatctggactcgctanacttggtcccataaatcctatagttcttaacaaaaaaacccatccgttagcaaacttacacatctaagctcagtttaatgcaacttaatgagacattgaattttatgcagctaacccaagttatctatagngtgngccctcctgagtnccccaggaaatagaagtaaagaactgacgaacatcanatccaactggcccatttgggtttggactctaggagagagcaaggaggaggcagganaggaagtggtggttctcttttggctgctgtcctggg

SEQ ID NO: 537 - DNA, 585 bp, Homo sapiens
  misc_feature 8, 9, 146, 162, 189, 223, 282, 363, 408, 453: n = A,T,C or G
gccctctnnatgcatgctcgagcggccgccctttttttttttttttttttttttttttttttactttgacaacaaattatattttaaatgtttcatatttacttttatatttccatacaatcagaaacagtaaaaaaaatttgganagcacataaaaacatnttaaagttaaaaatataaagccttgtntttaaaaatgcagtcatttaaataatattataanaatctatttgtacataataaacaagtttcaaccagcaagaaattactaatattgactgnggagttttggctgttttaatagttctaactcattattccgtaattcaacacagcactaccaacacagctggcaatgacaanactgggagtatcaaactaggattgttagttcaattaaaatttcanataaacaataatgtacttatactaaaaaattatttgttgtttatntgaaatgaaaatttaactgggtacccaattgtttgtttgtttaatctaaaaaccctgattgaaatttatctaataaaacatcatttaatatctaaaataaaataaatttactataacatctttataactatt

SEQ ID NO: 538 - DNA, 668 bp, Homo sapiens
  misc_feature 35, 36, 664: n = A,T,C or G
tatacgactcactatagggcgaattgggccctctnnatgcatgctcgagacaaagaacgtcagttacagaaggagaagaaaataaaagaactgcagaaaggggaggtgcccaagttcaaggcacttcccttgcctcattttgacaccattaacctgccagagaagaaggtaaagaatgtgacccagattgaacctttctgcttggagactgacagaagaggtgctctgaaggcacagacttggaagcaccagctggaagaagaactgagacagcagaaagaagcagcttgtttcaaggctcgtccaaacaccgtcatctctcaggagccctttgttcccaagaaagagaagaaatcagttgctgagggcctttctggttctctagttcaggaaccttttcagctggctactgagaagagagccaaagagcggcaggagctggagaagagaatggctgaggtagaagcccagaaagcccagcagttggaggaggccagactacaggaggaagagcagaaaaaagaggagctggccaggctacggagagaactggtgcataaggcaaatccaatacgcaagtaccagggtctggagataaagtcaagtgaccagcctctgactgtgcctgtatctcccaaattctccactcgattccactgctaantcag

SEQ ID NO: 539 - DNA, 644 bp, Homo sapiens
  misc_feature 1, 30, 549, 577, 597, 643: n = A,T,C or G
nactcactatagggcgaattgggccctctncatgcatgctcgagcggccgcccttttttttttttttttactttgacaacaaattatattttaaatgtttcatatttacttttatatttccatacaatcagaaacagtaaaaaaaatttggagagcacataaaaacatcttaaagttaaaaatataaagccttgtatttaaaaatgcagtcatttaaataatattataagaatctatttgtacataataaacaagtttcaaccagcaagaaattactaatattgactgtggagttttggctgttttaatagttctaactcattattccgtaattcaacacagcactaccaacacagctggcaatgacaagactgggagtatcaaactaggattgttagttcaattaaaatttcagataaacaataatgtacttatactaaaaaattatttgttgtatatctgaaatgaaaatttaactgggtacccaattgtttgtttgtttaatctaaaaaccctgattgaaatttatctaataaaacatcatttaanatctaaaataaaataaatttactataanatctttataactattcaatnaatgattcatcttctatttttccaaattcttgcacaaatatttgang

SEQ ID NO: 540 - DNA, 571 bp, Homo sapiens
  misc_feature 45, 212, 403, 410, 411, 419, 423, 425, 434, 518, 525, 530,531: n = A,T,C or G
gcatgctcgagcggccgccctttttttttttttttttggctctanagggcgtagagggggtgctatagggtaaatacgggccctatttcaaagatttttaggggaattaattctaggacgatgggcatgaaactgtggtttgctccacagatttcagagcattgaccgtagtatacccccggtcgtgtagcggtgaaagtggtttggtttanacgtccgggaattgcatctgtttttaagcctaatgtggggacagctcatgagtgcaagacgtcttgtgatgtaattattatacgaatgggggcttcaatcgggagtactactcgattgtcaacgtcaaggagtcgcaggtcgcctggttctaggaataatgggggaagtatgtaggagttgaagattagtncgccgtnntcggtgtnctcntnggttcattnccattggtggccaattgatttgatggtaagggagggatcgttgacctcgtctgttatgtaaaggatgcgtagggatgggagggngatgagnactannatgatggcgggcaggatagttcaaacggtttctatttcct

SEQ ID NO: 541 - DNA, 638 bp, Homo sapiens
tgggccctctcatgcatgctcgagcggccgcccttttttttttttttttactttgacaacaaattatattttaaatgtttcatatttacttttatatttccatacaatcagaaacagtaaaaaaaatttggagagcacataaaaacatcttaaagttaaaaatataaagccttgtatttaaaaatgcagtcatttaaataatattataagaatctatttgtacataataaacaagtttcaaccagcaagaaattactaatattgactgtggagttttggctgttttaatagttctaactcattattccgtaattcaacacagcactaccaacacagctggcaatgacaagactgggagtatcaaactaggattgttagttcaattaaaatttcagataaacaataatgtacttatactaaaaaattatttgttgtttatctgaaatgaaaatttaactgggtacccaattgtttgtttgtttaatctaaaaaccctgattgaaatttatctaataaaacatcatttaatatctaaaataaaataaatttactataacatctttataactattcaatcaatgattcatcttctatttttccaaattcttgcacaaatatttgatgcttaaataaataca

SEQ ID NO: 542 - DNA, 667 bp, Homo sapiens
  misc_feature 547, 609: n = A,T,C or G
ctatagggcgaattgggccctctacatgcatgctcgagcggccgccctttttttttttttttttttttaggttattaaataatttgtttattgtacggcatttacaaagaaaacagacaatgccctcagtagaaagaataaaaatgtatttagggctttatttttaactgacagcaaatagaaatcctttagtgagatcgtggcaatttgacagtattataattaagctcaataaaggtacatggggtacctggaagatcaagatctacagctgcctatttccacatctttcaatccatctggctccttaaataggggaaaaagcccttatttggtggagaagcatttccaaaatgaagttacaggttctattaaaacttactgtcacatcaactgttaaaatagggccttttgtgttttgttatttcaccttaatatcaccagaattcctgtaattccacaattgtgattttactatgtagaagataattcagttctagtctattgctttagatgtaaaaacagctgaaaacccaaagtggattanaattgctgaaggatttccctgccgttgtttgatacaatctattctcttgattcttgataggngcatagaaagcctaacttaaaattctttctacaggaacatgtctgatttcaggagtac

SEQ ID NO: 543 - DNA, 547 bp, Homo sapiens
  misc_feature 47, 55, 154, 181, 353, 372, 438, 448, 467, 478, 507, 526: n = A,T,C or G
gcatgctcgagcggccgcccttttttttttttttttttttttttttnacactcanattgtttatttaaaaatgcccaaaacacaaaaatagacttttaaggtaataatatatattactaaatatattatagtctacttataataattatatcgncgttttcaatattacaaaaaaaggaanaaaaatacaagggaagcagacgacccaatatatataaatactataaaatcatattaaaataaataaagtcgtcataaataaagggcccattgatttatgggtggggtttggcaacggctttggctacttgcttttggagggtaatttgagcaccaggattccccctcagganaggttccagttaccagganacactggaacctcaggtctataaaaactggaggggcagtgaaggcctattattcacagcacataanattctagganacagatttgggcagggaanaggtggggganagggttcattgcctcccttaaatatgctncaattttttttcccccaanaacctgggaagacactccatc

SEQ ID NO: 544 - DNA, 521 bp, Homo sapiens
  misc_feature 170, 225: n = A,T,C or G
ctttttttttttttttcccccttaatgaaaatacaacaacctatgtgacttcccaagaaacacagtttttatcttggctggtcacatatgtgtactctgcctagcatgtgtgaaatttccagactcacaaaaagaatagcaggataagccacattatttccatagtctanatacagtaaaccatgattaccagttagggaaccctcttgaaattcaagtcctcanaagccagcctaggaccaactgtgcagacagacagaccctccttcacaggataatataatagtctcagatctgcgttgttaatttttgtttgcatagagttttataattggaaggtgtctcaaatgctacatatttctgtctaatggactttagtaagagtgttgtatagtatacaacatggaattattctccattataggcaggctgtgataagtgttctaatgtttatacaaaagaactctgtaactttgagcagagtaaagagagtgttaacgatacttttgactgcaaatagt

SEQ ID NO: 545 - DNA, 258 bp, Homo sapiens
atacgactcactatagggcgaattgggccctctagatgcatgctcgagataaaaccatcaagctatggaataccctgggtgtgtgcaaatacactgtccaggatgagagccactcagagtgggtgtcttgtgtccgcttctcgcccaacagcagcaaccctatcatcgtctcctgtggctgggacaagctggtcaaggtatggaacctggctaactgcaagctgaagaccaaccacattggccacacaggctatctga

SEQ ID NO: 546 - DNA, 579 bp, Homo sapiens
  misc_feature 496: n = A,T,C or G
tatacgactcactatagggcgaattgggccctctagatgcatgctcgagtggtattatgaggcctcaggtgccttggggtacattgtcatgctataagggatgtatatcataaggtatggtggaagaggggccttatgtgaatgattgccacatactgtttctgttgctgctttttttccgattcctttttgtcattggatttgtttgttttgtcatgtggtgaatggtgttttagttattgtgttgctgccagaatcagaatccagttcttgttcttactgccttatagttattgtgttgccaccagaatcagaatccagttcttgttcatactgccttgtagtgagggcagtttaatatctacaaagaagcttttagaagctgaaaaagtcaatgtgattgtgcattctgcttttaagaagctgtttcagctatgaactgtgtatgtgctataagtgtgaggtaccataagttatttaatttttaaaagagganctcctgagtgagctgtttaagaaatctgagtgtgatctattgttacgttatttataactaggtaaaatgtctgtcgtgataga

SEQ ID NO: 547 - DNA, 582 bp, Homo sapiens
gactcactatagggcgaattgggccctctacatgcatgctcgagcggccgccctttttttttttttttatagagctaattggcttttatttgtgatttatgaattaaagcagcaccactctacaagtacagtgatagctccccctgggcaatacaatacaagaacagtgggttttgtcaaattggaacaaggaaacagaaccacagaaataaatacattggttaacatcagattagttcaggttacttttttgtaaaagttaaagtagaggggacttctgtattatgctaactcaagtagactggaatctcctgtgttctttttttttttaaattggttttaattttttttaattggatctatcttcttccttaacatttcagttggagtatgtagcatttagcaccactggctcaatgcgctcacctaggtgagagtgtgaccaaatcttaaagcattagtgctattatcagttaccaccatttggggcttttatccttcatgggttatgatgttctcctgatgacacatttctctgagttttgtaattccagccaaagagagaccattcactatttgatg

SEQ ID NO: 548 - DNA, 625 bp, Homo sapiens
  misc_feature 19, 71: n = A,T,C or G
agggcgaatgggccctctnatgcatgctcgaggggtgtgttcctacttagctttgtacagcccagatgtgntatttctacaggaagttattcccccatattatagctacctaaagaagagatcaagtaattatgagattattacagggtcatgaagaaggatatttcacagctataatgttgaagaaatcaagagtgaaattaaaaagccaagagattattccttttccaagtaccaaaatgatgagaaaccttttatgtgtgcatgtgaatgtgtcaggaaatgagctttgccttatgacatcccatttggagagcaccagagggcatgctgcggaacgaatgaatcagttaaaaatggttttaaagaaaatgcaagaggctccagagtcagctacagttatatttgcaggagatacaaatctaagggatcgagaggttaccagatgtggtggtttacccaacaacattgtggatgtctgggagtttttgggcaaacctaaacattgccagtatacatgggatacacaaatgaactctaatcttggaataactgctgcttgtaaacttcgttttgatcgaatatttttcagagcagcagcagaagagggacacattattccccg

SEQ ID NO: 549 - DNA, 519 bp, Homo sapiens
  misc_feature 10, 82, 118, 181, 208, 218, 227, 230, 238, 261, 265, 310,358, 360, 365, 380, 396, 417, 419, 438, 450, 459, 465, 479,489, 505: n = A,T,C or G
tgggccctcnagatgcatgctcgagcggccgcgtcgacttttttttttttttttttttttttttttttttttttacactcanattgtttatttaaaaatgcccaaaacacaaaaatanacttttaaggtaataatatatattactaaatatattatagtctacttataataattatatcgncgttttcaatattacaaaaaaaggaanaaaaatacangggaagcanacnacccaatntatataaatactataaaatcatnttanaataaataaagtcgtcataaataaagggcccattgatttatgggnggggtttggcaacggctttggctacttgcttttggagggtaatttgancnccagnattccccctcagganaggttccagttaccangaaacactggaacctcaggtntntaaaaactggaggggcagngaaggcctattnttcacagcncataanattctaggaaacanatttgggcanggaaaaggtggggganagggttcattgcct

SEQ ID NO: 550 - DNA, 224 bp, Homo sapiens
gatgcatgctcgagataaaaccatcaagctatggaataccctgggtgtgtgcaaatacactgtccaggatgagagccactcagagtgggtgtcttgtgtccgcttctcgcccaacagcagcaaccctatcatcgtctcctgtggctgggacaagctggtcaaggtatggaacctggctaactgcaagctgaagaccaaccacattggccacacaggctatctga

SEQ ID NO: 551 - DNA, 534 bp, Homo sapiens
  misc_feature 7, 134, 219, 232, 250, 266, 286, 290, 316, 415, 450, 459,466, 476, 483, 518: n = A,T,C or G
tacgacncactatagggcgaattgggccctctcgatgcatgctcgagcggccgcgtcgactttttttttttttttttttttttttttttctttgctcacatttaatttttattttgattttttttaatgctgcncaacacaatatttatttcatttgtttcttttatttcattttatttgtttgctgctgctgttttatttatttttactgaaagtganagggaacttttgnggccttttttcctttttntgtaggccgccttaanctttctaaatttggaacatntaancaagctgaagggaaaagggggtttcncaaaatcactcgggggaagggaaaggttgctttgttaatcatgccctatggggggtgattaactgcttgtacaattacgtttcacttttaattaattgngcttaaggctttaattaaatttgggggttcccttnttaaagcanctcgtantgacaaaggngcatgcnctgaatgatgtcacggcagtcgttgaacacacggnggatgttctcagtgtc

SEQ ID NO: 552 - DNA, 538 bp, Homo sapiens
  misc_feature 19, 136, 471: n = A,T,C or G
ctttttttttttttttganatcagaattaaattctttaatacaaaatgcttttttttttttaagatatatctgtatttctttgtcgttgtttaaaaataaatatgtactacggaatatctcgaaaaactgcactanagacaaagacgtgatgttaatatcttttccccacaattattacggataaacagtagcaccaataaataaatgataacaaatattaaaattaaaaaaggagagagatttagtatgtagaattctctattttttcttgttttgtttttacatataaaaaacagaatagcaatgtctattttatcagaatcacatatatacataaacatatatatatatatatacacacaaatacaagttgccaaatatatatatagtatgtagatgtatattgaaaccttatttcaaaggaatgtgtgctggggagccaggggatcggggagggcagagctgagtgnttagcaaaattaaatatctgttcaagataagctagtgactgtcaccgatcagggagagagagattgg

SEQ ID NO: 553 - DNA, 249 bp, Homo sapiens
  misc_feature 4: n = A,T,C or G
ctcntatagggcgaattgggccctctagatgcatgctcgagaggacaaaaacccacaccggacatagatcacaaaacttcctagaactctcctttaaatcggaagaaatttgtaaaatgtgatatgaaatacaactctacaaacatccaaaatacatttctggtcataattaatcgtatttgacattttcctctaagtttaatgcaactttaaataatttaggctttttcctaacatgatagatttttt

SEQ ID NO: 554 - DNA, 618 bp, Homo sapiens
  misc_feature 31: n = A,T,C or G
gactcactatagggcgaattgggccctctanatgcatgctcgagcggccgcgtcgaccggcgttgttctggattcccgtcgtaacttaaagggaaattttcacaatgtccggagcccttgatgtcctgcaaatgaaggaggaggatgtccttaagttccttgcagcaggaacccacttaggtggcaccaatcttgacttccagatggaacagtacatctataaaaggaaaagtgatggcatctatatcataaatctcaagaggacctgggagaagcttctgctggcagctcgtgcaattgttgccattgaaaaccctgctgatgtcagtgttatatcctccaggaatactggccagagggctgtgctgaagtttgctgctgccactggagccactccaattgctggccgcttcactcctggaaccttcactaaccagatccaggcagccttccgggagccacggcttcttgtggttactgaccccagggctgaccaccagcctctcacggaggcatcttatgttaacctacctaccattgcgctgtgtaacacagattctcctctgcgctatgtggacattgccatcccatgcaacaacaagggagctcactcagtgg

SEQ ID NO: 555 - DNA, 434 bp, Homo sapiens
  misc_feature 32, 33, 59, 183, 243, 361, 387, 411: n = A,T,C or G
cttttttttttttttttttttttttaacaaannaaattctttatttaaatttctcttgnggggaaaatatttttctttaaagcacacttaaaagtaatttgcatttacttcctgtaaagcatttccatttcacaattagcaaaactaaaaggctatgtctcttcatgcatttatttttgttanaaaaatgtcccatggtgctatcaaaccgattttaaccatcatcaagcttaactttgcctntgttgacaacatgactacaaacatgaatcaaaaaggagttaaggaattttaagccataaggtttcaattatagcttaccaattatgtaattagctgacaaaaatcaagtctgatgtanaatagctgtcatctacttaactgcanataatcatggcattttcatttaanatgatctgaacttatgaaataaa

SEQ ID NO: 556 - DNA, 608 bp, Homo sapiens
  misc_feature 75, 200, 348: n = A,T,C or G
atgcatgctcgagcggccgcccttttttttttttttttgatggtttatgctaattttaagtgtaatatattttanaattttgtcacatgcattattagtatgatttcatattcatggccttaggaagattaatttaaacaataacaacaagaacaacaacaacaacaaaatacaacaaaaaatttcccccatgtgccaanagcaaattttgaggtccatttatccagataaagtgttttgttatctgaaccaagaacatgaactttatctttatagtgaccacagactcatatctctagtatcatgatttttaatttgaattaaagcatttttttttgctttgttaanatgaggcaggccttcttgctgacattttaaaaagcaactatttttctttcagtttacactatgaggcattggctccaactgtcagcattgaaactgtcagcagttccctaccaggaaactggttccaaggtctagggtttccttaggtagaggctggcactgtgaaaataatggggctctttatccatgtcacctggaatggagttaataccctgccagtcttagttgatttgacatactaacaggatgggtctgaacgt

SEQ ID NO: 557 - DNA, 641 bp, Homo sapiens
  misc_feature 11: n = A,T,C or G
gggccctctanatgcatgctcgagcggccgccctttttttttttttttactttgacaacaaattatattttaaatgtttcatatttacttttatatttccatacaatcagaaacagtaaaaaaaatttggagagcacataaaaacatcttaaagttaaaaatataaagccttgtatttaaaaatgcagtcatttaaataatattataagaatctatttgtacataataaacaagtttcaaccagcaagaaattactaatattgactgtggagttttggctgttttaatagttctaactcattattccgtaattcaacacagcactaccaacacagctggcaatgacaagactgggagtatcaaactaggattgttagttcaattaaaatttcagataaacaataatgtacttatactaaaaaattatttgttgtttatctgaaatgaaaatttaactgggtacccaattgtttgtttgtttaatctaaaaaccctgattgaaatttatctaataaaacatcatttaatatctaaaataaaataaatttactataacatctttataactattcaatcaatgattcatcttctatttttccaaattcttgcacaaatatttgatgcttaaataaatacataaa

SEQ ID NO: 558 - DNA, 418 bp, Homo sapiens
  misc_feature 356, 406: n = A,T,C or G
cttttttttttttttttttattatcaaacactgaatttatttagaaacaaaataaaaacatgctatttgaacaaacttttttataaagaataagttgactgaaaagcagttttaaataacatcaactcacaaatgacttttagaagccaaataaacatttccattttagagaatagtatgtaatacataacttaaaagcatatagaacacatattcctacattcttaaaaataagagattgtgattccacagagaattttttcaaatatctaaagtatgtcctgttaaaccaacaatttgcttccaaacaggagtctcttttgagaagctaaatattaattttcaaacaactattnctccatttgttaactggaatcattcatattaaaacaaaggtctttatgtnaatgtatgttaa

SEQ ID NO: 559 - DNA, 603 bp, Homo sapiens
  misc_feature 500: n = A,T,C or G
tgggccctctacatgcatgctcgagcggccgccctttttttttttttttaggaattaagcaaccacatttttaatcaataaatatgaacatttgttttttaaccagttactattaggcagaaaaaaacagtcatttatcaagaattcaaaagataacaccatcttgaaaacaaagtgccaaaaatctttgccataaactcttcctcacttatagaactaaaagtaacaaatatttactcaaaataaggcttggaataatctaaaaagttccagatatattttaaagctataacagattttgcacataaagccaaaacagattgttttacacatacatagactatctgacaacccaatgaataaatgattgaatggataaattgttgagcattagtgattacttatgttcacattatgggccaggcttacatccatttcttgttcttctcctgcctcactgtcccttgctcttccaaggtccttggtgaggtggcttccanataggcctgggcagtaaggtgctggtggaagatgtgagggcaggataggtgagaccaaggtattctcttatctgtctcagctcactccatctcagtcagtggc

SEQ ID NO: 560 - DNA, 57 bp, Homo sapiens
  misc_feature 55: n = A,T,C or G
ctcactatagggcgaattgggccctctacatgcatgctcgagcggccgccctttntt

SEQ ID NO: 561 - DNA, 654 bp, Homo sapiens
  misc_feature 7, 36, 37: n = A,T,C or G
gtatacnactcactatagggcgaattgggccctctnnatgcatgctcgagcggccgccttttttttttttttttttactttgacaacaaattatattttaaatgtttcatatttacttttatatttccatacaatcagaaacagtaaaaaaaatttggagagcacataaaaacatcttaaagttaaaaatataaagccttgtatttaaaaatgcagtcatttaaataatattataagaatctatttgtacataataaacaagtttcaaccagcaagaaattactaatattgactgtggagttttggctgttttaatagttctaactcattattccgtaattcaacacagcactaccaacacagctggcaatgacaagactgggagtatcaaactaggattgttagttcaattaaaatttcagataaacaataatgtacttatactaaaaaattatttgttgtttatctgaaatgaaaatttaactgggtacccaattgtttgtttgtttaatctaaaaaccctgattgaaatttatctaataaaacatcatttaatatctaaaataaaataaatttactataacatctttataactattcaatcaatgattcatcttctatttttccaaattcttgcacaaatatttgatgctt

SEQ ID NO: 562 - DNA, 84 bp, Homo sapiens
  misc_feature 53, 79: n = A,T,C or G
atgcatgctcgagcggccgcccttttttttttttttttttttttttttttttntttttttttttttttttttttttttnggggg

SEQ ID NO: 563 - DNA, 585 bp, Homo sapiens
  misc_feature 193, 428, 445, 544, 574: n = A,T,C or G
ctatagggcgaattgggccctctagatgcatgctcgagcggccgcccttttttttttttttttctttgctcacatttaatttttattttgattttttttaatgctgcacaacacaatatttatttcatttgtttcttttatttcattttatttgtttgctgctgctgttttatttatttttactgaaagtganagggaacttttgtggccttttttcctttttctgtaggccgccttaagctttctaaatttggaacatctaagcaagctgaagggaaaagggggtttcgcaaaatcactcgggggaagggaaaggttgctttgttaatcatgccctatggtgggtgattaactgcttgtacaattacgtttcacttttaattaattgtgcttaaggctttaattaaatttgggggttcccttcttanagcagctcgtactgacnaaggtgcatgcgctgaatgatgtcacggcagtcgttgaacacacggcggatgttctcagtgtccacagcgcaggtgaaatgagggtagcagtagtgacncccatctccactggcagtgctgatcctcanaaactcatctc

SEQ ID NO: 564 - DNA, 685 bp, Homo sapiens
  misc_feature 668: n = A,T,C or G
tacgactcactatagggcgaattgggccctctacatgcatgctcgagaggacaaaaacccacaccggacatagatcacaaaacttcctagaactctcctttaaatcggaagaaatttgtaaaatgtgatatgaaatacaactctacaaacatccaaaatacatttctggtcataattaatcgtatttgacattttcctctaagtttaatgcaactttaaataatttaggctttttcctaacatgatagatttttttcagtatcagaaatggacaagaggaaactccagtaaagagaaaagcaatgaatttaaaagggtgcagaatctgaaaacaaactaaccacaatgtacatttaattgtacttaattgtatatttcatttaaatagtccttctcaggggtttaataatttagaatcaatagttcccttcaaaacataataaaatatttacactttataaaatattaaccgattaacaatacagccgtgttgtttataagagtgtaactgaagtcctgcaaatcatgctgttgacacaagcctgtgaggttagcgaagtgatccttagcaaaatgtaaatgaagatcttcagacagtggtgtttataaaatagctcattaatgacttaggattgaatcgctccaaccattcgcatcatcagatatantaatagtgacgaatcag

SEQ ID NO: 565 - DNA, 615 bp, Homo sapiens
  misc_feature 2: n = A,T,C or G
cnactcactatagggcgaattgggccctctagatgcatgctcgagaagtaattatcagttggtttggatttttggaccaccgttcagtcattttgggttgccgtgctcccaaaacattttaaatgaaagtattggcattcaaaaagacagcagacaaaatgaaagaaaatgagagcagaaagtaagcatttccagcctatctaatttctttagttttctatttgcctccagtgcagtccatttcctaatgtataccagcctactgtactatttaaaatgctcaatttcagcaccgatggccatgtaaataagatgatttaatgttgattttaatcctgtatataaaataaaaagtcacaatgagtttgggcatatttaatgatgattatggagccttagaggtctttaatcattggttcggctgcttttatgtagtttaggctggaaatggtttcacttgctctttgactgtcagcaagactgaagatggcttttcctggacagctagaaaacacaaaatcttgtaggtcattgcacctatctcagccataggtgcagtttgcttctacatgatgctaaaggctgcgaatgggatccgagctcggtaccaagctt

SEQ ID NO: 566 - DNA, 235 bp, Homo sapiens
  misc_feature 12: n = A,T,C or G
ttgggccctctnatgcatgctcgagataaaaccatcaagctatggaataccctgggtgtgtgcaaatacactgtccaggatgagagccactcagagtgggtgtcttgtgtccgcttctcgcccaacagcagcaaccctatcatcgtctcctgtggctgggacaagctggtcaaggtatggaacctggctaactgcaagctgaagaccaaccacattggccacacaggctatctga

SEQ ID NO: 567 - DNA, 599 bp, Homo sapiens
  misc_feature 11, 26, 27: n = A,T,C or G
ctataggggcngaattgggccctctnnatgcatgctcgagcaccgtcattaccccgagcacctgcagccccaggaagtcctggccgtcctcgctcaccaggagcccctcttggacccatgggtccaggagctccattttcgcctggaagaccattttcaccctttaatccaggagcacctgtttcacccttttctccatttcgtccatcgaagcctctgtgtcctttcataccagggaatccaggtatcccagctggacctttgatacctggaggtccaggcaatcctcgctctccaggtcgtccgggtctacctgattctccatcttttccagcaggaccagatggacctatagcaccaggaggtcctggagggcctgaaggaccagcttgcccaggttcaccagggggtccttggtatcctggagatccaggggaaccaggatgaccagatgtaccagggggaccgggagggcctggggggccagctggtccaggatagcctgcgagtcctcctactgctactccagacttgacatcatatgaatcatactggggagaatagttctgaggaccagtagggcatgattcacagattcc

SEQ ID NO: 568 - DNA, 247 bp, Homo sapiens
ctttttttttttttttttgttttataatatcatttatttatgtaatctaaaaaagtcaaattcctagaagtagagagtagaatcgtagttgccaggaattggggtggggtaaggggatgaaataaagctatattggtcagagggtacaaactttcatttgtattagtcattatatattatatatgtatatatatatatgtgcgtgtgtgtgtaggtgtgtgtgtgtgtgcgtgtgtatgtgtgtgtg

SEQ ID NO: 569 - DNA, 234 bp, Homo sapiens
  misc_feature 11: n = A,T,C or G
tgggccctctnatgcatgctcgagataaaaccatcaagctatggaataccctgggtgtgtgcaaatacactgtccaggatgagagccactcagagtgggtgtcttgtgtccgcttctcgcccaacagcagcaaccctatcatcgtctcctgtggctgggacaagctggtcaaggtatggaacctggctaactgcaagctgaagaccaaccacattggccacacaggctatctga

SEQ ID NO: 570 - DNA, 609 bp, Homo sapiens
  misc_feature 33, 34: n = A,T,C or G
tacgactcactatagggcgaattgggccctctnnatgcatgctcgagagagctacctttttccttttatgtataaggacacagctagaaaatgccatgtatgatccagaggcctaatttgttgatcccttaatcttggacttcccaccattgagaacagcgagaaataaatttctgttgtttataagctgccaagttcatagtatttcattacagcagcctgcacagaccaaggcagtatttttttttaatgtcttctaagggaacccccccaaaagtaaacaaaaatctacaaaagttatttgtatgatcaaaatcaaaacattcttattcacgaaatagaagctacagtaaattttcaaaaaataagagttaaaaaactccccccatatgatatattttacagtttcacaagggtaccaggtcgtgaaggaattttattaaatctattaaatcatagatagcttttaataagttcaattttactttaagagctaataagttacttgatattaacctttttacttataaggtaagtgggagatatgacatcataatcttagacatttaaaaaatcctgagaaagattatttcaatcttttacagtttg

SEQ ID NO: 571 - DNA, 621 bp, Homo sapiens
acgactcactatagggcgaattgggccctctacatgcatgctcgagtcggccagctggatctcccacaaggtttccttgttaaaacggtgcttaagtaacctggccggcagcacgacttatgatgaagcacgaagaagccaggttctgtgtcgatcactctctcagtcccctcaactgctcatcttaaactatttggttcctgacacgtttccaaaaggggaaaggggaaaaggggaaggggggaaggggaacataaaaagtatttgttacatttaaaaagggggggaaggggaaagagctgtatctatgttcacctcattcaacttccttgagttatggcactatgatgttgcttaattaggtaagacatggatatttgcaccgagtgcaaatactgttcataacaaggtcatagctagaaagacagatgggctcaagtgtggacaaataatgtcatcaaggtaatagatcaaaaatattaaagccctataaaagatctgagcagtcaactccaaaacatccacatgacaaagtccttaaaatacaaatctcattactcttactcatgcaactgctaaaaaatagtgtgcagatatgtatttatatttgccttaaccttc

SEQ ID NO: 572 - DNA, 599 bp, Homo sapiens
gactcactatagggcgaattgggccctctacatgcatgctcgagtgcttcgaggggaaggagatcgagctcagcagggaggtgcggagcctgcaagccgagggcttcaacaaccatgtgctgtctgtgcggatcaaggggggcatttgggtgctatgtgaacacagtgacttccggggccgccagtggctggtgggaagctgcgagatcaccaactggctgacctacagcggcacccagagggtgggctccctctaccccatcaagcagcgccgggtttatttccgcctctggaatgcagcactggggggattcctggcagtgccggaccatgtggaggacatgaaagcaggccgtgtggtggtcgccgacccccaagctggaggtagctgcatctggtactacgaggatgggctgctgaagaaccagatggcccccaccatgagcctacaggtgattggaccccctagcccaggctccaaggtggtgctgtgggccgagagccgcctgccgcgccagacgtggagcatcagtgaatcgggccacatctgcagccagatgttcgaaggccagatcctggacgtgaagggaggccggggc

SEQ ID NO: 573 - DNA, 579 bp, Homo sapiens
  misc_feature 52, 100, 265, 274, 275, 327, 341, 546: n = A,T,C or G
atgcatgctcgagcggccgcccttttttttttttttttttttttttaaaganaaaaaatttttattgtgatataaaatgcacttataaaatgtccaccanaaggcatgtaattcttcactgctatataaatttactgggaatatgttattcaccatctaggtatgatactgccaactaaaacatactgtaaacgatgagttatactctataacaaatgcatcactgattttcagcaatcattggtttaataataattagtttaanactataatnncatctatattctggaatgtccatttactttaatgtagtgtagtggaatttanagtataattgcacntagatggtacagaaaaacattcacttctaaattattttataccttcatgacaggtagtcttcctgactgaaaataacagcttcagctatggtctgctccaggattcttaatgcaataatttgggtgtatgtgtgtctgtctacgtgtacacccatggaacaacttatatctttagtaaacaagtgcaacattattgtcagttatnttgcatgtttaaatattatagtctgattatttg

SEQ ID NO: 574 - DNA, 613 bp, Homo sapiens
cgactcactatagggcgaattgggccctctagatgcatgctcgagtcggccagctggatctcccacaaggtttccttgttaaacgggtgcttaagtaacctggccggcagcacgacttatgatgaagcacgaagaagccaggttctgtgtcgatcactctctcagtcccctcaactgctcatcttaaactatttggttcctgacacgtttccaaaaggggaaaggggaaaaggggaaggggggaaggggaacataaaaagtatttgttacatttaaaaagggggggaaggggaaagagctgtatctatgttcacctcattcaacttccttgagttatggcactatgatgttgcttaattaggtaagacatggatatttgcaccgagtgcaaatactgttcataacaaggtcatagctagaaagacagatgggctcaagtgtggacaaataatgtcatcaaggtaatagatcaaaaatattaaagccctataaaagatctgagcagtcaactccaaaacatccacatgacaaagtccttaaaatacaaatctcattactcttactcatgcaactgctaaaaaatagtgtgcagatatgtatttatatttgcctt

SEQ ID NO: 575 - DNA, 546 bp, Homo sapiens
  misc_feature 50, 162, 401, 416, 508, 515: n = A,T,C or G
gcatgctcgagcggccgcccttttttttttttttttttttttggctctanagggggtagagggggtgctatagggtaaatacgggccctatttcaaagatttttaggggaattaattctaggacgatgggcatgaaactgtggtttgctccacagatttcanagcattgaccgtagtatacccccggtcgtgtagcggtgaaagtggtttggtttaaacgtccgggaattgcatctgtttttaagcctaatgtggggacagctcatgagtgcaagacgtcttgtgatgtaattattatacgaatgggggcttcaatcgggagtactactcgattgtcaacgtcaaggagtcgcaggtcgcctggttctaggaataatgggggaagtatgtaggagttgaanattagtccgccgtantcggtgtactcgtaggttcagtaccattggtggccaattgatttgatggtaagggagggatcgttgacctcgtctgttatgtaaaggatgcntagggantgggagggcgatgaagactaggatgatggcg

SEQ ID NO: 576 - DNA, 403 bp, Homo sapiens
  misc_feature 37: n = A,T,C or G
gtatacgactcactatagggcgaattgggccctctanatgcatgctcgagaaagctcagccccacagaacctaagaactatggctcatacagcactcaggcctcagctgcagcagccacagctgagctgctgaagaaacaggaggagctcaaccggaaggcagaggagttggaccgaagggagcgagagctgcagcatgctgccctgggaggcacagctagacatctccatggagatcccccaagaatttcagaagactgtatccaccatgtactacctctggatgttggctggatctctgctctggtggtgccgaagggcaacacagcagtatccgtgctcatgctgctggtcgccctgctcttcactggcattgctgtgctaggaattgtcatgctgaaac

SEQ ID NO: 577 - DNA, 64 bp, Homo sapiens
tctagatgcatgctcgaggtgaagttttaaaaaaaaagttgtggaaggaagtccaagagtgttc

SEQ ID NO: 578 - DNA, 668 bp, Homo sapiens
  misc_feature 24, 79, 127, 139, 169, 175, 238, 275, 307, 398, 428, 430,439, 442, 456, 464, 473, 543, 561, 567, 569, 571, 582, 621,623, 629, 634, 644: n = A,T,C or G
ctatagggcgaattgggccctctngatgcatgctcgagcggccgcccttttttttttttttttttttttttttttatanagctaattggcttttatttgtgatttatgaattaaagcagcaccactntacaagtacagngatagctccccctgggcaatacaatacaanaacagngggttttgtcaaattggaacaaggaaacagaaccacagaaataaatacattggttaacatcanattagttcaggttacttttttgtaaaagttaaagtanaggggacttctgtattatgctaactcaagtanactggaatctcctgtgttctttttttttttaaattggttttaattttttttaattggatctatcttcttccttaacatttcagttggagtntgtagcatttagcaccactggctcaatgcncncacctaggnganagtgtgaccaaatnttaaagcnttagtgctnttatcagttaccaccatttggggcttttatccttcatgggttatgatgttctcctgatgacacatttctntgagttttgtaattccanccaaanananaccattcactntttgatggctggctgcatgcaaacatttaaagcttttananaatacnctacnccagggagtntgactactagtttgactattagga

SEQ ID NO: 579 - DNA, 564 bp, Homo sapiens
  misc_feature 13, 83, 131, 143, 173, 242, 279, 311, 326, 402, 414, 432,446, 460, 477: n = A,T,C or G
cactataggggcngaattgggccctctacatgcatgctcgagcggccgcccttttttttttttttttttttttttttttatanagctaattggcttttatttgtgatttatgaattaaagcagcaccactntacaagtacagngatagctccccctgggcaatacaatacaanaacagtgggttttgtcaaattggaacaaggaaacagaaccacagaaataaatacattggttaacatcanattagttcaggttacttttttgtaaaagttaaagtanaggggacttctgtattatgctaactcaagtanactggaatctcctgngttctttttttttttaaattggttttaattttttttaattggatctatcttcttccttaacatttcagttggagtntgtagcatttancaccactggctcaatgcnctcacctaggtganagtgtgaccaaatnttaaagcattagtgctnttatcaagttaccaccatttggggcttttatccttcatgggttatgatgttctcctgatgacacatttctctgagttttgtaattcc

SEQ ID NO: 580 - DNA, 667 bp, Homo sapiens
gactcactatagggcgaattgggccctctagatgcatgctcgagtctttaatataaccccaaatgaaagaaccaaggggagggctgggatggcacttttttttgttggtcttgttttgttttgttttttggttggttggttcgttattttttaagattagccattctctgctgctatttccctacataatgtcaatttttaaccataattttgacatgattgagatgtacttgaggcttttttgttttaattgagaaaagactttgcaatttttttttaggatgagcctctcctagacttgacctagaatattacatattcctccagtaagtaatactgaagagcaaaagagaggcaggattggggtcacagccgcttcttcagcatggaccaagtgggccttggggattgcagcgttctcgaagtggctgtaggactcgaatttacagaaagccacagaggtgcaacttgaggctctgctagcaagccaccagtgaggctattgggtaaccacctttctatacaggagattggaatctactttgtcatttatccaccacagtgacaaaggaaaagtggtgccgttatgcaatccatttaactcataaacatattactctgagtaactggccagccattcatcggatccgagctcggtaccaagctt

SEQ ID NO: 581 - DNA, 707 bp, Homo sapiens
  misc_feature 2, 32, 270, 530, 644: n = A,T,C or G
cnactcactatagggcgaattgggccctctanatgcatgctcgagcggccgccctttttttttttttttctttcaactcctttattaaattggttgcaaaaaagatatacattcttatattgacaattcttgtcatgaataaaagcatcaaaaataaggcaacagcaagatgtgcttcacatataaacaatcatgttgtaagaataagaaacctgaatccctgtacaacaaaaagattaggaagcaaaatgtgaataagcttgtattcanaatatacctatatgtgtgtgcaaagacaatacactcatcatatacctcacttaggttcctttatgatgcataattccttaatcattcatttgtgaaacaagaatgaatattaagaaacatgaaatccaaattgcacttattttcacaatatcaatgctaaactcaaaatagcaacttcattgactctcaatggtaaatttcaaacatggaaagcaatcttaatttttttaaccctttgactagggtctgtaaaaaacggnggattattttactgtacttacaaagaggctgggtctcagcctgcacttaaacagcatgagcaacaaaggacaggaaacaaatatcactaagagtaatgcccatacatataaagntatctagttgagccacgttctacttacatagcaagcctattaaaccactagcataacagatca

SEQ ID NO: 582 - DNA, 566 bp, Homo sapiens
  misc_feature 72, 212, 260, 289, 301, 331, 365, 391, 443, 445, 453, 462,468, 470, 510: n = A,T,C or G
atgcatgctcgagcggccgcccttttttttttttttttttttttttgagatcgagtcttgctctgttgccanactggagtgcagtggtgcgatctgggctcactgcaatctccacctcccgggttcaagcgattctcctgcctcagcctcccgagtaactgggactacaggtgcgcgccaccaagcccagctcatttttgtatttttagtanagatggggtttcacgatgttggctaggatggtctcgatctctggtcanagtcttttctgtaaatatccttggtaaanaagcaattttanactgtagctgttgcaaatgctttaaggaanaagcaaaacaactgtcagtcttcctgaaatgaanaaactacaccagggctgctatatcanagcaaccccaaccagcactccaatcatgatgccgacagtggccccagctgananaccagganaagttccanatgcananactgtgatgctcttgactatggaattattgcggccagtanccaagttagagacaaaacaggcataggtcccgttattatttggcgtgattttggcg

SEQ ID NO: 583 - DNA, 418 bp, Homo sapiens
  misc_feature 402, 416: n = A,T,C or G
tagggcgaattgggccctctagatgcatgctcgagcggccgccctttttttttttttttagggggtagaggggcgtgctatagggtaaatacgggccctatttcaaagatttttaggggaattaattctaggacgatgggcatgaaactgtggtttgctccacagatttcagagcattgaccgtagtatacccccggtcgtgtagcggtgaaagtggtttggtttagacgtccgggaattgcatctgtttttaagcctaatgtggggacagctcatgagtgcaagacgtcttgtgatgtaattattatacgaatgggggcttcaatcgggagtactactcgattgtcaacgtcaaggagtcgcaggtcgcctggttctaggaataatgggggaagtatgtangagttgaagattantc

SEQ ID NO: 584 - DNA, 387 bp, Homo sapiens
  misc_feature 23, 348: n = A,T,C or G
ctatagggcgaattgggccctcnagatgcatgctcgagcggccgcccttttttttttttttaaaaaaagatatattaacagttttagaagtcagtagaataaaatcttaaagcactcataatatggcatccttcaatttctgtataaaagcagatctttttaaaaagatacttctgtaacttaagaaacctggcatttaaatcatattttgtctttaggtaaaagctttggtttgtgttcgtgttttgtttgtttcacttgtttccctcccagccccaaaccttttgttctctccgtgaaacttacctttccctttttctttctctttttttttttgtatattattgnttacaataaatatacattgcattaaaagtcgacgcggcc

SEQ ID NO: 585 - DNA, 66 bp, Homo sapiens
atgcatgctcgagcggccgccctttttttttttttttttttttttttttttttttttttttttttt

SEQ ID NO: 586 - DNA, 615 bp, Homo sapiens
  misc_feature 32, 551, 568, 591: n = A,T,C or G
ctttttttttttttttttagttatagagctanttggcttttatttgtgatttatgaattaaagcagcaccactctacaagtacagtgatagctccccctgggcaatacaatacaagaacagtgggttttgtcaaattggaacaaggaaacagaaccacagaaataaatacattggttaacatcagattagttcaggttacttttttgtaaaagttaaagtagaggggacttctgtattatgctaactcaagtagactggaatctcctgtgttctttttttttttaaattggttttaattttttttaattggatctatcttcttccttaacatttcagttggagtatgtagcatttagcaccactggctcaatgcgctcacctaggtgagagtgtgaccaaatcttaaagcattagtgctattatcagttaccaccatttggggcttttatccttcatgggttatgatgttctcctgatgacacatttctctgagttttgtaattccagccaaagagagaccattcactatttgatggctggctgcatgcanacatttaaagcttttanagaatacactacaccagggagtntgactactagtatgactattagga

SEQ ID NO: 587 - DNA, 623 bp, Homo sapiens
attgggccctctagatgcatgctcgagcggccgcgtcgaccagcattcgggccgagatgtctcgctccgtggccttagctgtgctcgcgctactctctctttctggcctggaggctatccagcgtactccaaagattcaggtttactcacgtcatccagcagagaatggaaagtcaaatttcctgaattgctatgtgtctgggtttcatccatccgacattgaagttgacttactgaagaatggagagagaattgaaaaagtggagcattcagacttgtctttcagcaaggactggtctttctatctcttgtactacactgaattcacccccactgaaaaagatgagtatgcctgccgtgtgaaccatgtgactttgtcacagcccaagatagttaagtgggatcgagacatgtaagcagcatcatggaggtttgaagatgccgcatttggattggatgaattccaaattctgcttgcttgctttttaatattgatatgcttatacacttacactttatgcacaaaatgtagggttataataatgttaacatggacatgatcttctttataattctactttgagtgctgtctccatgtttgatgtatctgagcaggttgctcc

SEQ ID NO: 588 - DNA, 519 bp, Homo sapiens
  misc_feature 110, 142, 171, 187, 214, 376, 448, 468, 507, 518: n = A,T,C or G
gcatgctcgagcggccgccctttttttttttttttttttttttttaaaattctgaattttattagagaatatatctaaaatacaatatttattaagttatgatatattgnctgaatggaaatatacctctgtatcacaactntaattataacaatttttacagataatacntcatttatatctctgnaattcaaaagtcattaaattacaacanaattcatatttaagataactttgctataaatatataataatttttaaagtttttctttaatataacatcttgaaatcatgaacatttattttttctggtttacattacatagaatcatgactattttacctgatttgccttaactagctcaatttatcttgngctatggatttgcactcaaccattctactttcctatgttttaaaagcagcattttagtcaacaattgtgagngctcatcaccctacatgctnggaacaaagtcaagggactttattcttatttcttatccnatattctgggnt

SEQ ID NO: 589 - DNA, 89 bp, Homo sapiens
  misc_feature 85: n = A,T,C or G
gcatgctcgagcggccgcccttttttttttttttttttttttttttttttttttttttttttttttttttttttttttttttttngagg

SEQ ID NO: 590 - DNA, 462 bp, Homo sapiens
  misc_feature 27, 44, 260, 401, 406: n = A,T,C or G
cttttttttttttttttgttttttttnggctctagagggggtanagggggtgctatagggtaaatacgggccctatttcaaagatttttaggggaattaattctaggacgatgggcatgaaactgtggtttgctccacagatttcagagcattgaccgtagtatacccccggtcgtgtagcggtgaaagtggtttggtttaaacgtccgggaattgcatctgtttttaagcctaatgtggggacagctcatgagtgcaanacgtcttgtgatgtaattattatacgaatgggggcttcaatcgggagtactactcgattgtcaacgtcaaggagtcgcaggtcgcctggttctaggaataatgggggaagtatgtaggagttgaagattagtccgccgtantcggngtactcgtaggttcagtaccattggtggccaattgatttgatggtaagggagggat

SEQ ID NO: 591 - DNA, 572 bp, Homo sapiens
  misc_feature 42, 50, 209: n = A,T,C or G
gcatgctcgagcggccgccctttttttttttttttgctctanagggggtngagggggtgctatagggtaaatacgggccctatttcaaagatttttaggggaattaattctaggacgatgggcatgaaactgtggtttgctccacagatttcagagcattgaccgtagtatacccccggtcgtgtagcggtgaaagtggtttggtttanacgtccgggaattgcatctgtttttaagcctaatgtggggacagctcatgagtgcaagacgtcttgtgatgtaattattatacgaatgggggcttcaatcgggagtactactcgattgtcaacgtcaaggagtcgcaggtcgcctggttctaggaataatgggggaagtatgtaggagttgaagattagtccgccgtagtcggtgtactcgtaggttcagtaccattggtggccaattgatttgatggtaagggagggatcgttgacctcgtctgttatgtaaaggatgcgtagggatgggagggcgatgaggactaggatgatggcgggcaggatagttcaaacggtttctatttcctgagc

SEQ ID NO: 592 - DNA, 681 bp, Homo sapiens
  misc_feature 29, 548, 577, 621, 626: n = A,T,C or G
actcactatagggcgaattgggccctctngatgcatgctcgagacaaagaacgtcagttacagaaggagaagaaaataaaagaactgcagaaaggggaggtgcccaagttcaaggcacttcccttgcctcattttgacaccattaacctgccagagaagaaggtaaagaatgtgacccagattgaacctttctgcttggagactgacagaagaggtgctctgaaggcacagacttggaagcaccagctggaagaagaactgagacagcagaaagaagcagcttgtttcaaggctcgtccaaacaccgtcatctctcaggagccctttgttcccaagaaagagaagaaatcagttgctgagggcctttctggttctctagttcaggaaccttttcagctggctactgagaagagagccaaagagcggcaggagctggagaagagaatggctgaggtagaagcccagaaagcccagcagttggaggaggccagactacaggaggaagagcagaaaaaagaggagctggccaggctacggagagaactggngcataaggcaaatccaatacgcaagtacnagggtctggagataaagtcaagtgaccagcctctgactgtgccngtatntcccaaattctccactcgattccactgctaaactcaactgtgagctgcggatacc

SEQ ID NO: 593 - DNA, 393 bp, Homo sapiens
  misc_feature 51, 53, 73, 91, 121, 128, 167, 177, 216, 225, 245, 265, 281,295, 306, 313, 333, 363, 392: n = A,T,C or G
gcatgctcgagcggccgcccttttttttttttttttttttttttttttttntngaagtaattatttaatgacncaggaaaataacatgttntgaaacaagctggttacaagtagtaggtanatgactnaatttttgataaaaaaattaaaaagcataaacatgcatntaaaaattanattatgtacaaaataccaacagtatttacttctgctcantaattaaanattcttccctttgtttttgncttttaaaaaacattatttntgaaaaaaaaaatcanaaaaacatgatcgnggagaaaattnttaaacnccaggaattaggaacccaanaagctaagccaggagctcagcagtcaaggntggaagtccaggacaggtccgaccagggng

SEQ ID NO: 594 - DNA, 601 bp, Homo sapiens
  misc_feature 528: n = A,T,C or G
aattgggccctctagatgcatgctcgagcaccgtcattaccccgagcacctgcagccccaggaagtcctggccgtcctcgctcaccaggagcccctcttggacccatgggtccaggagctccattttcgcctggaagaccattttcaccctttaatccaggagcacctgtttcacccttttctccatttcgtccatcgaagcctctgtgtcctttcataccagggaatccaggtatcccagctggacctttgatacctggaggtccaggcaatcctcgctctccaggtcgtccgggtctacctgattctccatcttttccagcaggaccagatggacctatagcaccaggaggtcctggagggcctgaaggaccagcttgcccaggttcaccagggggtccttggtatcctggagatccaggggaaccaggatgaccagatgtaccagggggaccgggagggcctggggggccagctggtccaggatagcctgcgagtcctcctactgctactccagacttgacatcntatgaatcatactggggagaatagttctgaggaccagtagggcatgattcacagattccaggggggccaggag

SEQ ID NO: 595 - DNA, 588 bp, Homo sapiens
  misc_feature 425, 581: n = A,T,C or G
ctttttttttttttttcctctcactcactgtctttcttggatcactctggcagaatataatcaccaggtcatgaacaactctatggaaagaacaaagtgaaaatgaacaaagccttcagccaacagtcatgtgagtgggttttcttggaaatgcactctgtagcccatgatgagtcattaggtgactacagccttgcccaatagcttgactgcaatctcataagagatgaaccagaaccacccagcaaatcaccgattttcagaaaccatgtgaaataaaagatttttttatcctttgttgttaagttttggtataatttgttatgaaacagcagataaataacacacttttccatttcggtttgaaattgttttgaactaattacacaacaaaaattttcccatattttggcattagtttttanaaaatagttgcatttatattttctatccctagtaaaccaaaagaaaatctacagagaggtaagtcatctttataaaacagataacttttatatagtctactactcttttctattcaactattttctaaaaactaatgccaaaatagttgaatgtcnacgcggc

SEQ ID NO: 596 - DNA, 605 bp, Homo sapiens
  misc_feature 36, 37, 142, 154, 184, 190, 253, 290, 337, 413, 443, 454,471, 558, 584: n = A,T,C or G
tatacgactcattatagggcgaattgggccctctanntgcatgctcgagcggccgcccttttttttttttttttttttttttttttagttatagagctaattggcttttatttgtgatttatgaattaaagcagcaccactntacaagtacagngatagctccccctgggcaatacaatacaanaacagngggttttgtcaaattggaacaaggaaacagaaccacagaaataaatacattggttaacatcanattagttcaggttacttttttgtaaaagttaaagtanaggggacttctgtattatgctaactcaagtagactggaatctcctgngttctttttttttttaaattggttttaattttttttaattggatctatcttcttccttaacatttcagttggagtntgtagcatttagcaccactggctcaatgcnctcacctaggngagagtgtgaccaaatnttaaagcattagtgctattatcagttaccaccatttggggcttttatccttcatgggttatgatgttctcctgatgacacatttctntgagttttggaattccagccaaaganagaccattcactatttgatgg

SEQ ID NO: 597 - DNA, 644 bp, Homo sapiens
  misc_feature 71, 256, 319, 335, 632: n = A,T,C or G
catatagggcgaattgggccctctagatgcatgctcgagcggccgcccttttttttttttttttgatctgnggttttctttttaattatctttagtcttgtgatcacacataattttaaaatttgtgtatatctccgttactttaatccttttaagttggcaaaagcaccattcccaatcaaatacacagttctacagttttgtttctgaatggctgtttaaagacaatcctaaattataacttagtttgacttanattgtaaagaattcaagagtgaagtttaacttgctactattttaaaagcatgtgaccttatanatctgtaagatgtganaggtgttgaataatctttaatattacacataaaccacactaaaatgcctttcaataagtaaaagaaaccattttaaatacagggaattataattagattggcatagttaaggccaaaactatagacattgctaccttatttatcttcaacccttgcctttaagaggcaaatgaacatgaacacaaaacacaggtgaatcttgcttggttctaagacagtgaagcaatttccccagtatttaaatatattcacataaccagttatataaatctaaatataaaaccaatctccagtaangttttaagatgg

SEQ ID NO: 598 - DNA, 222 bp, Homo sapiens
  misc_feature 10: n = A,T,C or G
tatacgactnactatagggcgaattgggccctctagatgcatgctcgagaggcggagaggatcatgtccgggaactgcggggtagtagcgatctgggttacccagccgttgtggcccttgagggtgccacgaagggtcatctgctcagtcatggcggcggcgagagcgtgtgtcgctgcagcgacgaggatggcactggatggcttagagaaactagcacca

SEQ ID NO: 599 - DNA, 539 bp, Homo sapiens
  misc_feature 52, 57, 58, 86, 89, 118, 119, 134, 250, 277, 292, 340, 379,405, 438, 515: n = A,T,C or G
gccctctagatgcatgctcgagcggccgcccttttttttttttttttttttngcagnnatttttgaacctttattttaaaaatatngancatctattttaaaagttttgataattatnnccattattttcttgngattggtacaatttaaaaataagtctatgttttcacattgattttaaaaaatatagcatgtttgaattacaaatgattaagcaaactctattacttcatagctgaccatcttccanaaaattcccacttaattgaatacttanaaaaaaatggccagnggccgattgaaaggtatattaaaattaagggcagttttaattctgaanacaaatatcttcatggaaatctatttgtaagcttctganattgctgctgaaagtctacagtctgngaatataccaattcccctttacaactgatgcanatcattatgaaatactggaaggcataccctacaatttaggaattggtgtggctgccactgctatgctctcaattgcncactcatcagttcctctgcggatc

SEQ ID NO: 600 - DNA, 407 bp, Homo sapiens
gcatgctcgagtggcagattactaacgcaacttttgcagacagatgactctgcagaatttaacctagtgaacaatgccctattaagtatatttaaaatggatgcaaaagggactttaggtgggttgttcagccaaatacttcaaggagaggacattgttagagaacgagcaattaaattcctttctacaaaacttaagactttaccagatgaagtcttaacaaaggaagtggaagagcttatactaactgaatccaaaaaggtcctagaagatgtgactggtgaagaatttgttctatttatgaagatactgtctgggttaaaaagcttacagacagtgagtggaagacagcaacttgtagagttggtggctgaacaggccgacctagaacagaccttcaatccctc

SEQ ID NO: 601 - DNA, 63 bp, Homo sapiens
gcatgctcgagcggccgcccttttttttttttttttttttttttttttttttttttggaaaaa

SEQ ID NO: 602 - DNA, 529 bp, Homo sapiens
  misc_feature 5, 22, 262: n = A,T,C or G
tatcngactcatatagggcgantgggccctctagatgcatgctcgagcggccgccctttttttttttttttacactcagattgtttatttaaaaatgcccaaaacacaaaaatagacttttaaggtaataatatatattactaaatatattatagtctacttataataattatatcgtcgttttcaatattacaaaaaaaggaagaaaaatacaagggaagcagacgacccaatatatataaatactataaaatcatattanaataaataaagtcgtcataaataaagggcccattgatttatgggtggggtttggcaacggctttggctacttgcttttggagggtaatttgagcaccaggattccccctcaggagaggttccagttaccaggagacactggaacctcaggtctataaaaactggaggggcagtgaaggcctattattcacagcacataagattctaggagacagatttgggcagggaagaggtgggggagagggttcattgcctcccttaaatatgc

SEQ ID NO: 603 - DNA, 339 bp, Homo sapiens
  misc_feature 36: n = A,T,C or G
tatacgactcactatagggcgaattgggccctctanatgcatgctcgagtgttatttctttacaaatgcccttgtaattaccactctgaagtctgctgactgtgtctcttgaacatacttaggatattctgcacattatggaaaaaggtaaattttagaagtttctgctctactaactgtagatatttatgaccctgcgagttatctatttttataaccacctgtggtccattgttcattttaattcacatttcttatgaagtatggtaacagggagggagacacctagattagcagctcaatttgtactacttcagccaatctgtgaatgtaaaaact

SEQ ID NO: 604 - DNA, 425 bp, Homo sapiens
  misc_feature 406: n = A,T,C or G
tgggccctctagatgcatgctcgagcggccgcccttttttttttttttttactttgacaacaaattatattttaaatgtttcatatttacttttatatttccatacaatcagaaacagtaaaaaaaatttggagagcacataaaaacatcttaaagttaaaaatataaagccttgtatttaaaaatgcagtcatttaaataatattataagaatctatttgtacataataaacaagtttcaaccagcaagaaattactaatattgactgtggagttttggctgttttaatagttctaactcattattccgtaattcaacacagcactaccaacacagctggcaatgacaagactgggagtatcaaactaggattgttagttcaattaaaatttcagataaacaatnatgtacttatactaaaaaa

SEQ ID NO: 605 - DNA, 495 bp, Homo sapiens
gccctctagatgcatgctcgaggttctctgtcatctctgtggtctctagaagagctctgatcctgttcatattctcgttcttctcttgagtccttttctctgtctcgtttgcccctagtatcttccctcctttcgtggcgtcgatcatgagactgtgaagttcgttcatgatcatgtctccctttctctcgcattggagagcgatgtcttggaggactctgctttctctggggagacgacaaagaatgtgaaggataaggagaggcagagcgtcgtaaaggtggagttagtgtccgctgataagatggtgaaggagttctttttcgacgaggagaaggagaatgtctttgaatagatgatcctgattgtgaggaagatgagtgatgtctagaagatataggagaatgatgctgtcctgctggggaagtagaccttggcttggctctcttttctctttgtcgttcaaaatctcgtcctctgtcctttccatctctt

SEQ ID NO: 606 - DNA, 55 bp, Homo sapiens
  misc_feature 32: n = A,T,C or G
cttttttttttttttttttttttttttttttntttttggaaaaagtcatggaggc

SEQ ID NO: 607 - DNA, 261 bp, Homo sapiens
atatagggcgaatgggccctctagatgcatgctcgagcggccgccctttttttttttttttgagatggagtctcgctctgtcacccaggctagagtgcagtggcatgaccttggcttactgcaacctccgcctcctgggttcaagcgattccagaagagagaattcttagagtcagagggaggagtagaaggaaaaagatatttaaaaagctatgcttcaagaggacatttcatgctgtcaaaatgagactgtgaatcaga

SEQ ID NO: 608 - DNA, 420 bp, Homo sapiens
  misc_feature 155, 163, 174, 191, 251: n = A,T,C or G
gccctctagatgcatgctcgagcggccgcgtcgactggattcactgcctccctagaagcccaacagagcaatgcaagtgggcacaaggagtatggttctaacgtgattggggtcatgaagacgttgctgttggacttggcttgagtggtcactgntcttccancccgggtggcntgtactttagttcccangcctaaatgtgactgtgaacgctactttcatgtattcggatggtctgattcataactcangcgactgccggagtagcacctgtgaaggcctcgacctactcaggaaaatttcaaatgcacaacggatgggctgtgtcctcatagggccctcatgtacatactccaccttccagatgtaccttgacacagaattgagctaccccatgatctcagctggaagttttggatt

SEQ ID NO: 609 - DNA, 605 bp, Homo sapiens
  misc_feature 6, 17: n = A,T,C or G
gactcnatataggggcngaattgggccctctacatgcatgctcgagcaccgtcattaccccgagcacctgcagccccaggaagtcctggccgtcctcgctcaccaggagcccctcttggacccatgggtccaggagctccattttcgcctggaagaccattttcaccctttaatccaggagcacctgtttcacccttttctccatttcgtccatcgaagcctctgtgtcctttcataccagggaatccaggtatcccagctggacctttgatacctggaggtccaggcaatcctcgctctccaggtcgtccgggtctacctgattctccatcttttccagcaggaccagatggacctatagcaccaggaggtcctggagggcctgaaggaccagcttgcccaggttcaccagggggtccttggtatcctggagatccaggggaaccaggatgaccagatgtaccagggggaccgggagggcctggggggccagctggtccaggatagcctgcgagtcctcctactgctactccagacttgacatcatatgaatcatactggggagaatagttctgaggaccagtagggcatgattcacagattcc

SEQ ID NO: 610 - DNA, 573 bp, Homo sapiens
  misc_feature 512: n = A,T,C or G
taccgactcactataggggccgaattgggccctctagatgcatgctcgagtctttaatataaccccaaatgaaagaaccaaggggaggggtgggatggcacttttttttgttggtcttgttttgttttgttttttggttggttggttcgttattttttaagattagccattctctgctgctatttccctacataatgtcaatttttaaccataattttgacatgattgagatgtacttgaggcttttttgttttaattgagaaaagactttgcaattttttttttaggatgagcctctcctagacttgacctagaatattacatattcctccagtaagtaatactgaagagcaaaagagaggcaggattggggtcacagccgcttcttcagcatggaccaagtgggccttggggattgcagcgttctcgaagtggctgtaggactcgaatttacagaaagccacagaggtgcaacttgaggctctgctagcaagccaccagtgaggctattngggtaaccacctttctatacaggagattggaatctactttgtcatttatccaccacagtga

SEQ ID NO: 611 - DNA, 475 bp, Homo sapiens
  misc_feature 26, 376: n = A,T,C or G
gccctctagatgcatgctcgagcggnccgcccttttttttttttttttttttactttgacaacaaattatattttaaatgtttcatatttacttttatatttccatacaatcagaaacagtaaaaaaaatttggagagcacataaaaacatcttaaagttaaaaatataaagccttgtatttaaaaatgcagtcatttaaataatattataagaatctatttgtacataataaacaagtttcaaccagcaagaaattactaatattgactgtggagttttggctgttttaatagttctaactcattattccgtaattcaacacagcactaccaacacagctggcaatgacaagactgggagtatcaaactaggatngttagttcaattaaaatttcagataaacaataatgtacttatactaaaaaattatttgttgtttatctgaaatgaaaatttaactgggtacccaattgt

SEQ ID NO: 612 - DNA, 418 bp, Homo sapiens
  misc_feature 56, 223: n = A,T,C or G
gccctctagatgcatgctcgagcggccgccctttttttttttttttttggctctanagggggtagagggggtgctatagggtaaatacgggccctatttcaaagatttttaggggaattaattctaggacgatgggcatgaaactgtggtttgctccacagatttcagagcattgaccgtagtatacccccggtcgtgtagcggtgaaagtggtttggtttanacgtccgggaattgcatctgtttttaagcctaatgtggggacagctcatgagtgcaagacgtcttgtgatgtaattattatacgaatgggggcttcaatcgggagtactactcgattgtcaacgtcaaggagtcgcaggtcgcctggttctaggaataatgggggaagtatgtaggagttgaagattagtccgcc

SEQ ID NO: 613 - DNA, 64 bp, Homo sapiens
  misc_feature 7: n = A,T,C or G
tctagangcatgctcgagcggccgcgtcgacttttttttttttttttttttttttttttttttt

SEQ ID NO: 614 - DNA, 575 bp, Homo sapiens
  misc_feature 5, 17: n = A,T,C or G
gactnactataggggcngaattgggccctctagatgcatgctcgagcggccgcccttttttttttttttttttaaaagctccaagtcattagctttatttttactgaattcagcatgggatgacaaaaatgcattatatcactaccatccattattacatgtagacatttatccttgtattctttatatgtccattttctacgttaaatctgttaaccaatactaatttaaattacatgatttcctactaaaaatatgcagttcatataagcaagggcaaataaatcctccttaaaacattttattcctttataattgagaacttaacagtcttaatggctagttcttaaaaaatgtttataggattaagtttatttaagagagcagacaaacaaaacatattgtaaaactagtattttccagaagcaatttccattctcttcctttcttcctgcaaactggtgttttatctttacaagttctctgtcattccataagaaagctgaacagtggttaaaacatccagtttgcttgaattcctgagtgattcagattccagtgagattgagggtcat

SEQ ID NO: 615 - DNA, 640 bp, Homo sapiens
tatacgactcattatagggcgaattgggccctctagatgcatgctcgagtcggccagctggatctcccacaaggtttccttgttaaaagggtgcttaagtaacctggccggcagcacgacttatgatgaagcacgaagaagccaggttctgtgtcgatcactctctcagtcccctcaactgctcatcttaaactatttggttcctgacacgtttccaaaaggggaaaggggaaaaggggaaggggggaaggggaacataaaaagtatttgttacatttaaaaagggggggaaggggaaagagctgtatctatgttcacctcattcaacttccttgagttatggcactatgatgttgcttaattaggtaagacatggatatttgcaccgagtgcaaatactgttcataacaaggtcatagctagaaagacagatgggctcaagtgtggacaaataatgtcatcaaggtaatagatcaaaaatattaaagccctataaaagatctgagcagtcaactccaaaacatccacatgacaaagtccttaaaatacaaatctcattactcttactcatgcaactgctaaaaaatagtgtgcagatatgtatttatatttgccttaaccttcaaaaatctagggacat

SEQ ID NO: 616 - DNA, 250 bp, Homo sapiens
  misc_feature 232, 234: n = A,T,C or G
tatacgactcactatagggcgaattgggccctctagatgcatgctcgagccctttccagcactgttggtctgatgaacaaggttgttttaccttattttctcttggaacatatctgaaaaccttccccacaaataacttgtcacaccttttgtttcattctgagtctttagttttagtcatgggctttcttcacctgctctaggtgcaaaggcatgttgggaaagagatggntnttggggaggaagagag

SEQ ID NO: 617 - DNA, 554 bp, Homo sapiens
  misc_feature 15, 16, 17, 18, 34, 64, 510: n = A,T,C or G
gtcttacgtttttannnntaagatggctgtttcntaaattagttccctattcctaactttgganaacctggttttttcttacctttcaaggtccaaatataaaactataaactttcagtgttggacattcttgctttttgaaagcaaattcctcctcaattcatgacctgtgggccagctatcatgaataatacacccatagcacttgggttttatgaatgtgacttctaaatcctcctgcataatagctttaggtgacttgaagagttaaaagctgtcattgtcatcaatatttactgtacatcaaactcatttaaaatgctgttagaaattgctgactggcaagactgtcactgacaaaaacaccagtttaggacagattccatgggaaacaaactagaataactgaaagctaaaatagagcttaatggtagagaaagtctcagaaacaaggacagagatcacagaaaagacaaggaaggactcctattgttttttctgattttgaanagctctttgtgcttacctatttatcctaaacaaaaaggcatgag

SEQ ID NO: 618 - DNA, 221 bp, Homo sapiens
gcatgctcgagataaaaccatcaagctatggaataccctgggtgtgtgcaaatacactgtccaggatgagagccactcagagtgggtgtcttgtgtccgcttctcgcccaacagcagcaaccctatcatcgtctcctgtggctgggacaagctggtcaaggtatggaacctggctaactgcaagctgaagaccaaccacattggccacacaggctatctga

SEQ ID NO: 619 - DNA, 549 bp, Homo sapiens
  misc_feature 183: n = A,T,C or G
ctttttttttttttttttttaataagtcaaagcattgtttatttatgacatatttacatatttacaaaactgattttactcaatacatcatcctgcgtaatatcataaaatgaacaccatatcctgggaataaaaatccatatttcttaataatttatgtatagcccaacttttagaacatanaatattatcaatttggcttcccaaactacaaagtcctgtttataattttttctagccaaggaacagagtagattcaacagcatattaaagtaatttagttaaccctgagtaattactaacttgcataattttgaatggatgtatataacacactttcatctgcacttagatacttatactatcacactacctttttgtatttatccacctcaattttcaacttcattaatcttcagaagaaagaggaataaagaataggaaagtaataacagaatcattacgaggaaattactagcactgcctaaacattcagaagtctgtgacacagtttaggtctagggttgtctcaaaaacctaacaaaagga

SEQ ID NO: 620 - DNA, 595 bp, Homo sapiens
atgcatgctcgagcaccgtcattaccccgagcacctgcagccccaggaagtcctggccgtcctcgctcaccaggagcccctcttggacccatgggtccaggagctccattttcgcctggaagaccattttcaccctttaatccaggagcacctgtttcacccttttctccatttcgtccatcgaagcctctgtgtcctttcataccagggaatccaggtatcccagctggacctttgatacctggaggtccaggcaatcctcgctctccaggtcgtccgggtctacctgattctccatcttttccagcaggaccagatggacctatagcaccaggaggtcctggagggcctgaaggaccagcttgcccaggttcaccagggggtccttggtatcctggagatccaggggaaccaggatgaccagatgtaccagggggaccgggagggcctggggggccagctggtccaggatagcctgcgagtcctcctactgctactccagacttgacatcatatgaatcatactggggagaatagttctgaggaccagtagggcatgattcacagattccaggggggccaggagaaccagggg

SEQ ID NO: 621 - DNA, 479 bp, Homo sapiens
aagtaattatcagttggtttggatttttggaccaccgttcagtcattttgggttgccgtgctcccaaaacattttaaatgaaagtattggcattcaaaaagacagcagacaaaatgaaagaaaatgagagcagaaagtaagcatttccagcctatctaatttctttagttttctatttgcctccagtgcagtccatttcctaatgtataccagcctactgtactatttaaaatgctcaatttcagcaccgatggccatgtaaataagatgatttaatgttgattttaatcctgtatataaaataaaaagtcacaatgagtttgggcatatttaatgatgattatggagccttagaggtctttaatcattggttcggctgcttttatgtagtttaggctggaaatggtttcacttgctctttgactgtcagcaagactgaagatggcttttcctggacagctagaaaacacaaaatcttg

SEQ ID NO: 622 - DNA, 414 bp, Homo sapiens
  misc_feature 383: n = A,T,C or G
gcatgctcgagagagctacctttttccttttatgtataaggacacagctagaaaatgccatgtatgatccagaggcctaatttgttgatcccttaatcttggacttcccaccattgagaacagcgagaaataaatttctgttgtttataagctgccaagttcatagtatttcattacagcagcctgcacagaccaaggcagtatttttttttaatgtcttctaagggaacccccccaaaagtaaacaaaaatctacaaaagttatcccgtatgatcaaaatcaaaacattcttattcacgaaatagaagctacagtaaattttcaaaaaataagagttaaaaaactccccccatatgatatattttacagtttcacaagggtnccaggtcgtgaaggaattttattaaatctat

SEQ ID NO: 623 - DNA, 631 bp, Homo sapiens
cgactcactatagggcgattgggccctctagatgcatgctcgagcggccgcgtcgacccttagctgtgctcgcgctactctctctttctggcctggaggctatccagcgtactccaaagattcaggtttactcacgtcatccagcagagaatggaaagtcaaatttcctgaattgctatgtgtctgggtttcatccatccgacattgaagttgacttactgaagaatggagagagaattgaaaaagtggagcattcagacttgtctttcagcaaggactggtctttctatctcttgtactacactgaattcacccccactgaaaacgatgagtatgcctgccgtgtgaaccatgtgactttgtcacagcccaagatagttaagtgggatcgagacatgtaagcagcatcatggaggtttgaagatgccgcatttggattggatgaattccaaattctgcttgcttgctttttaatattgatatgcttatacacttacactttatgcacaaaatgtagggttataataatgttaacatggacatgatcttctttataattctactttgagtgctgtctccatgtttgatgtatctgagcaggttgctccacaggtagctctaggagggctgg

SEQ ID NO: 624 - DNA, 435 bp, Homo sapiens
  misc_feature 365: n = A,T,C or G
ctttttttttttttttgagggtacatcgggggagaggagaggagaggagagcctctctgtgccttggtttcccatttgtgcattcagggcctctgcaggcctcacacagggagtctgaggggatagtgtttaagtgagcactcaggcttcctctgaggaaaagaaatgaccaaagtgcagacttttattactgccattcctgctcctaatgggagcaggagtcaaaaggaaaaacaaattaaaaggggctaatgagaaaggaggagagatgagacagagagtgtgaagggctatgccgctggcatctcataaattcttattgagaatggcacaggtattaaaaaagtttctgggtagtctacganaaatgtcaattattatctctactacaactacttacatatatctaatgggaaaagagtggggcttaggtgt

SEQ ID NO: 625 - DNA, 408 bp, Homo sapiens
atgcatgctcgagtctttaatataaccccaaatgaaagaaccaaggggagggctgggatggcacttttttttgttggtcttgttttgttttgttttttggttggttggttcgttattttttaagattagccattctctgctgctatttccctacataatgtcaatttttaaccataattttgacatgattgagatgtacttgaggcttttttgttttaattgagaaaagactttgcaattttttttttaggatgagcctctcctagacttgacctagaatattacatattcctccagtaagtaatactgaagagcaaaagagaggcaggattggggtcacagccgcttcttcagcatggaccaagtgggccttggggattgcagcgttctcgaagtggctgtaggact

SEQ ID NO: 626 - DNA, 459 bp, Homo sapiens
gcatgctcgaggtaacagaggtgaaagaggatctgagggctccccaggccacccagggcaaccaggccctcctggacctcctggtgcccctggtccttgctgtggtggtgttggagccgctgccattgctgggattggaggtgaaaaagctggcggttttgccccgtattatggagatgaaccaatggatttcaaaatcaacaccgatgagattatgacttcactcaagtctgttaatggacaaatagaaagcctcattagtcctgatggttctcgtaaaaaccccgctagaaactgcagagacctgaaattctgccatcctgaactcaagagtggagaatactgggttgaccctaaccaaggatgcaaattggatgctatcaaggtattctgtaatatggaaactggggaaacatgcataagtgccaatccttgaatgttccacggaaacactggtgg

SEQ ID NO: 627 - DNA, 161 bp, Homo sapiens
  misc_feature 58, 77, 152: n = A,T,C or G
gcatgctcgagcggccgcccttttttttttttttttttttttttttttttttgggctntagagggggtagggggggngctatagggtaaatacgggccctatttcaaagatttttaggggaattaattctaggacaatgggcatgaaactgnggtttgctc

SEQ ID NO: 628 - DNA, 87 bp, Homo sapiens
  misc_feature 68, 83: n = A,T,C or G
gcatgctcgagcggccgccctttttttttttttttttttttttttttttttttttttttttttttttnatttaaaattttttnattt

SEQ ID NO: 629 - DNA, 468 bp, Homo sapiens
gccaactcacacaaggcaggtgagtgaggaaatccagagttgccatggagaaaaatccagtgtcagcattcttgctccttgtggccctctcctacactctggccagagataccacagtcaaacctggagccaaaaaggacacaaaggactctcgacccaaactgccccagaccctctccagaggttggggtgaccaactcatctggactcagacatatgaagaagctctatataaatccaagacaagcaacaaacccttgatgattattcatcacttggatgagtgcccacacagtcaagctttaaagaaagtgtttgctgaaaataaagaaatccagaaattggcagagcagtttgtcctcctcaatctggtttatgaaacaactgacaaacacctttctcctgatggccagtatgtccccaggattatgtttgttgacccatctctgacagttagagccgatatca

SEQ ID NO: 630 - DNA, 396 bp, Homo sapiens
gcatgctcgagtgcaagctggaggcagactgagtcctcggatgcttcggccagttctgactctagaggacaatacatacctctcatcaaagtagccagaacggattttacttgcatctagatccgtggtgtgcttcattgtccgggggtcatatccattgtgtcgctcttggatcacagggtcaaacaggtcagcaaatacctcataggtctcctcatctccagccaccatgcccacagtcttgatgaaggggtggccagggttgtccacgccagtctggatacactgatctagcgtccaaccagtgggtgtggtcttgtcgcagagccgtgcatagactgctggggtcaggtgactggccatgcagttgttgtgctttcggaggtctgggtactc

SEQ ID NO: 631 - DNA, 355 bp, Homo sapiens
  misc_feature 9: n = A,T,C or G
gccctctanatgcatgctcgaggctgcccccaagggatgggaagcagtaactacgctctcagggagaatgggtactgaggatgccaccagtcaaagagccgaacgctgtgcactgggtccaggatgacttgcacaccctgttcactgcgcagtttccgaccaccatggacaggggaatcttggaacaccagtctcactcgatgatgccgcatgtccgtgctcacattgatagtaaacagagtaaatatcattcccatgacaatcggaataaagatgaaattgagggtggtgacctgcagtaggcagcagtcctggtctggattggtatgaacatcttcgtactgaacgggaggct

SEQ ID NO: 632 - DNA, 144 bp, Homo sapiens
  misc_feature 20: n = A,T,C or G
gggcgaattgggccctctanatgcatgctcgagtgcaagccactgggcattaagactgctctgaaggcctgcaagaccccccaaagccagcagtcagcctacttcctgttaacactgtttagagaggtggctattttgtacaga

SEQ ID NO: 633 - DNA, 67 bp, Homo sapiens
  misc_feature 61: n = A,T,C or G
tctagatgcatgctcgagcggccgccctttttttttttttttttttttttttttttttcanttggaa

SEQ ID NO: 634 - DNA, 637 bp, Homo sapiens
  misc_feature 212, 301: n = A,T,C or G
cgactcactatagggcgattgggccctctagatgcatgctcgagcggccgccctttttttttttttttaatagcttaagtattttatttgtttgcaactaagcttgttaacactatataatgaaaatgtacaaagaataatgttgcagtttttggttagatttaagtcaaagacattcattaataaggaatcttcgaatgtgaatattccanaaatttctctaagccatctgatcacaacaactgtctctgaatattaccttactttggaaggtattggcatacatttgaattaaactcanaatttttcaaaataagccctaattaaaaaaactattctatattcaaagtaaaacaatattaatagaactttcctttccagaaacaatgaaggaaacaaggcattttgtaaaatgtggtcctgaacaagtcacagtaaaaaataaatgtatacttaacttccacctcctcaaaacagaggctactttctgttcctcagccttggaaacaaggtgaagaacagcctatatgcgacttcgggcagggggttgccaaaacaaagctgaagcagttgaccatggacacctcaaaagaatttgggagaacccgaccaaaggatccgagctcggtaccaagct

SEQ ID NO: 635 - DNA, 66 bp, Homo sapiens
  misc_feature 59, 60: n = A,T,C or G
ttgggccctctagcatgcatgctcgagcggccgcccttttttttttttttttttttttnnaagaaa

SEQ ID NO: 636 - DNA, 580 bp, Homo sapiens
  misc_feature 531: n = A,T,C or G
gcatgctcgagaagtaattatcagttggtttggatttttggaccaccgttcagtcattttgggttgccgtgctcccaaaacattttaaatgaaagtattggcattcaaaaagacagcagacaaaatgaaagaaaatgagagcagaaagtaagcatttccagcctatctaatttctttagttttctatttgcctccagtgcagtccatttcctaatgtataccagcctactgtactatttaaaatgctcaatttcagcaccgatggccatgtaaataagatgatttaatgttgattttaatcctgtatataaaataaaaagtcacaatgagtttgggcatatttaatgatgattatggagccttagaggtctttaatcattggttcggctgcttttatgtagtttaggctggaaatggtttcacttgctctttgactgtcagcaagactgaagatggctttcctggacagctagaaaacacaaaatcttgtaggtcattgcacctatctcagccataggtgcagtttgcttntacatgatgctaaaggctgcgaatgggatccgagctcggtaccaagctt

SEQ ID NO: 637 - DNA, 469 bp, Homo sapiens
  misc_feature 52, 402, 410, 449: n = A,T,C or G
gcatgctcgagcggccgcccttttttttttttttttttttggtttgatgacntagataattcaggttgtcatttataattttagagtttgcttcacatatacaatgctgtgttacgaaacaatgaacacttttataaaaaatttatttcacacttttatacaaatatccacaggtaatttctaatcatgaaataattttacaatgctagttagtacaaaaatgtatcaaatgcaaacagaccagtgacttgacttgagatgacatttttaacaaccataaatctaaacaccataacatctttgtttctttgttgaaccaccctcccaacacccttttcaggacattcatcttttttttagtaacacaggtctaaaaacactgtcaaagtatcagctccttancaatctancaatctaaacacattagggacacaagttccccaagcaanaaactgagactttaaacact

SEQ ID NO: 638 - DNA, 624 bp, Homo sapiens
  misc_feature 562, 612: n = A,T,C or G
tgggccctctagatgcatgctcgagtctttaatataaccccaaatgaaagaaccaaggggaggggtgggatggcacttttttttgttggtcttgttttgttttgttttttggttggttggttcgttattttttaagattagccattctctgctgctatttccctacataatgtcaatttttaaccataattttgacatgattgagatgtacttgaggcttttttgttttaattgagaaaagactttgcaattttttttttaggatgagcctctcctagacttgacctagaatattacatattcctccagtaagtaatactgaagagcaaaagagaggcaggattggggtcacagccgcttcttcagcatggaccaagtgggccttggggattgcagcgttctcgaagtggctgtaggactcgaatttacagaaagccacagaggtgcaacttgaggctctgctagcaagccaccagtgaggctattgggtaaccacctttctatacaggagattggaatctactttgtcatttatccaccacagtgacaaaggaaaagtggntgccgttatgcaatccatttaactcataaacatattactctgagtaactngccagccattca

SEQ ID NO: 639 - DNA, 471 bp, Homo sapiens
  misc_feature 177, 236, 445, 447: n = A,T,C or G
ctttttttttttttttactttgacaacaaattatattttaaatgtttcatatttacttttatatttccatacaatcagaaacagtaaaaaaaatttggagagcacataaaaacatcttaaagttaaaaatataaagccttgtatttaaaaatgcagtcatttaaataatattataanaatctatttgtacataataaacaagtttcaaccagcaagaaattactaatattgactgnggagttttggctgttttaatagttctaactcattattccgtaattcaacacagcactaccaacacagctggcaatgacaagactgggagtatcaaactaggattgttagttcaattaaaatttcagataaacaataatgtacttatactaaaaaattatttgttgtttatctgaaatgaaaatttaactgggtacccaattgtttgttngnttaatctaaaaaccctgattgaaa

SEQ ID NO: 640 - DNA, 212 bp, Homo sapiens
gcatgctcgagcggccgcgacgcccgccgcagctggggcgatccacgggacgggcccggctcgcgtccagagtcgccgccgccgccggccccccgggtgcccgggcccccctcgcgggggaccgtgcccccgccgccggggccccgcggcgggccgccgccggcccctgccgccccgacccttctccccccgccgccgcccccacgcggcgc

SEQ ID NO: 641 - DNA, 66 bp, Homo sapiens
  misc_feature 2, 20, 32, 34, 38: n = A,T,C or G
anatatatatatatatatanatatatatatananatanatatatatatatatatatatatatatat

SEQ ID NO: 642 - DNA, 237 bp, Homo sapiens; identical to SEQ ID NO: 409

SEQ ID NO: 643 - DNA, 462 bp, Homo sapiens
  misc_feature 152: n = A,T,C or G
catatagggcgaattgggccctctagatgcatgctcgagcggccgcccttttttttttttttttttaaagttacataagtaaatttaatcatagcatactacatagctcagctgtattagttatgtagacttttgatctaatctataattgngacaaaactataccgagagaatgaagaagtggaaatatatgtggaacagagccttcctccatggtatgaaatagatttctttaaaaaaataaaaaaaagaagtgaacaatataagcatattacttagaaacatggaggtatatacctgaaaaactcaagagttgaaagtggtcacctctggggagtgggaatcttgaatgggaggaatgggctggggcttttttgttataagccttgactttttaaattatgatcatgtgtaactgataaaaataaaagttagaataaaagcactagcacaatgtctgcc

SEQ ID NO: 644 - DNA, 406 bp, Homo sapiens
gggcgaattgggccctctagatgcatgctcgagggacagggtgctggttttaagggtggactcctacgtgtcccatcacagtgacacaccccccagggtgtgaaccagactccactgggtattagggggccctccgagagatggcttatcagtccctgctgagggatgcggttctggactggctggccctgcccttcctgaaagtctggatgctgctgatggggagcatgggcggggcaggtggcatctgaggcagagacaaaggcagccgtccctcggttcggggaggggggggggtagtcacagcaaacagggccaaaccaaccacaccaggacaggcagaccccaccctcctagagacgctggacgctaggcaggacagcttggggtcagtgtccttggtccc

SEQ ID NO: 645 - DNA, 322 bp, Homo sapiens
  misc_feature 255, 282: n = A,T,C or G
agggcgattgggccctctagatgcatgctcgagcggccgcccttttttttttttttttgcagttatttttaaacctttattttaaaaatatgagcatctattttaaaagttttgataattattgccattattttcttgtgattggtacaatttaaaaataagtctatgttttcacattgattttaaaaaatatagcatgtttgaattacaaatgattaagcaaactctattacttcatagctgaccatcttccanaaaattcccacttaattgaatacttanaaaaaaatggccagtggccgattgaaaggtatattaaaat

SEQ ID NO: 646 - DNA, 181 bp, Homo sapiens
tgcatgctcgagcggccgccctttttttttttttttgttttagttcagtttattttttaatatgtcctgagttctttctgttcataaaattatgatcttatgacagctgtaacttttaattaataatattaacaaatcattattgatataggcttttcaatttgctcaagattaggaattg

SEQ ID NO: 647 - DNA, 261 bp, Homo sapiens
  misc_feature 258: n = A,T,C or G
gggcgaatgggccctctagatgcatgctcgagtcggccagctggatctcccacaaggtttccttgttaaaagggtgcttaagtaacctggccggcagcacgacttatgatgaagcacgaagaagccaggttctgtgtcgatcactctctcagtcccctcaactgctcatcttaaactatttggttcctgacacgtttccaaaaggggaaaggggaaaaggggaaggggggaaggggaacataaaaagtatttgttacnatt

SEQ ID NO: 648 - DNA, 120 bp, Homo sapiens
  misc_feature 54, 63, 108: n = A,T,C or G
tgcatgctcgagcggccgccctttttttttttttttttttttttttggctctanagggggtanagggggtgctatagggtaaatacgggccctatttcaaagattttnaggggaattaat

SEQ ID NO: 649 - DNA, 525 bp, Homo sapiens
  misc_feature 6, 11, 520: n = A,T,C or G
tatacnactcnctatagggcgaattgggccctctagatgcatgctcgagcagttaccaaggaccactttactgcgatcaggattccaacgaccacctaatttcgtatctttcaactcttttcgaccggacctcttattcggaagcgttacaggaagacaggtctcaacttagggatcagatcacgttatcaacgctctgggatcgctgcaacctggcacttcaaggaagtgcaccgataacgtctagaccggcaaacacagatctagaggtggccaactgatcactgtaggagctgactggcaaagtcaaccaggcccaaccaagagtgaccaagacaacgattaggataacccacaggcactcctcgtcataaggccaacgacacagacaggctggcaaataaagggtttaatatttggttaaaaattgattttaaaaaacaagaaaaatatcctcaaaacatttacatttgatcactaatattaaagttcaaaatatcccccaaattacatttaattnaatgt

SEQ ID NO: 650 - DNA, 569 bp, Homo sapiens
  misc_feature 56, 468, 499, 526, 533, 545: n = A,T,C or G
gccctctagatgcatgctcgagcggccgcccttttttttttttttttttttggttngatgacatagataattcaggttgtcatttataattttagagtttgcttcacatatacaatgctgtgttacgaaacaatgaacacttttataaaaaatttatttcacacttttatacaaatatccacaggtaatttctaatcatgaaataattttacaatgctagttagtacaaaaatgtatcaaatgcaaacagaccagtgacttgacttgagatgacatttttaacaaccataaatctaaacaccataacatctttgtttctttgttgaaccaccctcccaacacccttttcaggacattcatcttttttttagtaacacaggtctaaaaacactgtcaaagtatcagctccttagcaatctagcaatctaaacacattagggacacaagttccccaagcaagaaactganactttaaacactgttataacctgttttacanaaatttttgtaacaaaatatattttgngactaanaattccaaagtncaaccaaaacaacgtccttagtat

SEQ ID NO: 651 - DNA, 427 bp, Homo sapiens
atgcatgctcgagcggccgcccttttttttttttttttaggtaaaacaggatgtaaagtttatatacaagaatataatgtttatctgaaatatttacagtgttggttaaagcaatatttttacaacttttaaaggtaaactactatgtatattacaggtaagctacaatgggtttaatttgcaaaagttaagtaagaaatgttttaaacaaggcttaaagtactcaagtcaattataaaatttatatcttttgccttttacttgaagaaatcatgctatagaaatggttaatgtgcttctaataaatggaagtattgtagctggaatgtgatacatgtaacagtttaagttcccattgaaggtataaaatgatgaattgttgtaagacttagacactgagtctcagtctggagctgatgaagatgtt

SEQ ID NO: 652 - DNA, 254 bp, Homo sapiens
gactcactatagggcgaattgggccctctagatgcatgctcgagataaaaccatcaagctatggaataccctgggtgtgtgcaaatacactgtccaggatgagagccactcagagtgggtgtcttgtgtccgcttctcgcccaacagcagcaaccctatcatcgtctcctgtggctgggacaagctggtcaaggtatggaacctggctaactgcaagctgaagaccaaccacattggccacacaggctatctga

SEQ ID NO: 653 - DNA, 642 bp, Homo sapiens
  misc_feature 190, 450, 549, 589, 590, 622: n = A,T,C or G
gccctctagatgcatgctcgagcggccgccctttttttttttttttttttgtacaccagtttgaagggagtgaggctaggaaaacatttattacctcacccttggtagcagaagcaaggaccaccccagttctaggccactagcatgtatctcctacacaggagcactgagtcctatgatggtggcttanagaagggatttgatggttagattatacagcccatcagggatgaagagagaatactgctaaggagagatggagctctgaggacaggggcaagggcaatggaacctggactggttatgttcaccactgaaaccccagtaattgccactgcaactccatatacttcaggcattcatcaatcattaacatagagagggcggagggacaagaaacagatgactctgctacagaaacaacatcctgaaaaagtagaagcaccttanaagtagctaatctaactgcctcatttaaatacttggtagagacaatctagttagatagaaagagagaaagaattagaacacaaacccactatctcctanactactgcatttcccatttaatcattcactcatccatcannaattttctgagtgcctatgactgtgaggcctnaaatgtcagatgccagggac

SEQ ID NO: 654 - DNA, 526 bp, Homo sapiens
ctttttttttttttttggttagggggagtctgaattccagatgtgtggcaactaagagatgggtgattatttgtaatttggttaaaatgatcagtctaattttccaaaggtgaaactgaatggcaataagtactgagttctgataaacagaatgccctcacccccaacaaggtagatacctatgtccgaattaccgaaacctgtgaatgttaccttgtgtggcaaaaaggactttgcagatgtgattaaattaagatcttgaaattagatcatgttggattatttgggtggaccaaaaataatcacaaggtctttataaaagggaggcataagggtcacagtcagagaagatgtgacagtggaccagaggtccgaatgatgtagctgcaagccaagaaatgcaggcattctcaaatcgctggaaaaggcagggagcaaattctgcccgagcctccagatggagtgcagcccttccaacaccttgattttagtcccctaagatccatttcagacttctgatcaccag

SEQ ID NO: 655 - DNA, 648 bp, Homo sapiens
  misc_feature 3, 4, 631, 639: n = A,T,C or G
tanncgactcatatagggcgattgggccctctagatgcatgctcgagaagtaattatcagttggtttggatttttggaccaccgttcagtcattttgggttgccgtgctcccaaaacattttaaatgaaagtattggcattcaaaaagacagcagacaaaatgaaagaaaatgagagcagaaagtaagcatttccagcctatctaatttctttagttttctatttgcctccagtgcagtccatttcctaatgtataccagcctactgtactatttaaaatgctcaatttcagcaccgatggccatgtaaataagatgatttaatgttgattttaatcctgtatataaaataaaaagtcacaatgagtttgggcatatttaatgatgattatggagccttagaggtctttaatcattggttcggctgcttttatgtagtttaggctggaaatggtttcacttgctctttgactgtcagcaagactgaagatggcttttcctggacagctagaaaacacaaaatcttgtaggtcattgcacctatctcagccataggtgcagtttgcttctacatgatgctaaaggctgcgaatgggatccgagctcggtaccaagcttggcgtaatcatggncatagctngttcctgtg

SEQ ID NO: 656 - DNA, 82 bp, Homo sapiens
  misc_feature 27: n = A,T,C or G
catatagggcgaatgggccctctagcngcatgctcgagcgggccgccctttttttttttttttttttttttttttttttttt

SEQ ID NO: 657 - DNA, 76 bp, Homo sapiens
  misc_feature 18: n = A,T,C or G
tatatatatatatatatntatatatatatatatatatatatatatatatatatatatatatatatatatatatata

SEQ ID NO: 658 - DNA, 570 bp, Homo sapiens
  misc_feature 541: n = A,T,C or G
agggcgaatgggccctctagatgcatgctcgagcggccgctcgcgatctaaattttatggattttcaattttttgttcccttttgttttttaccttcaatgtgagataattaagttaatcattaaatcacattatatctttaatccacatttcagatgtatttgctgacataaggaataccttttgtttctagttaagagtaaaagcccatgtttcactcagaattttaccagaaaataacagcatttcagtaggtggcagtcttctctctgagtttttatttagtcatactgttggatctttaggatcttttgggaaacaaattattgttagtcagataaggtcacttaattctttaatagctatattgaaattattttagtgttgtgactttgttgagatgcatctggaggtgaagccagttttatattatgtgttctaactgcctgaatgccgtgttctttattgagtttcttacctaaaagtgagaaggtttataaagtctattaagtatttaagcatattaaatgagtacatttgngtgtatatatatattatttagagattgga

SEQ ID NO: 659 - DNA, 357 bp, Homo sapiens
atgcatgctcgaggttatggaacagcacatttctagaggaatattccaaactgaactacttggacattctcatgcgagccttcattgatgtgactgctgctgccgaaaatatcaggctgccaaatgcaggcactcaggttcgagtgactgtgtttccctcaaagactgtagctcagtattcgggagtaccttggtggatcatcctagtggctattctcgctgggatcttgatgcttgctttattagtgtttatactatggaagtgtggattctttaaacgctctaggtacgatgacagtgttccccgataccatgctgtaaggatccgagctcggtaccaagcttggcgtaatcatg

SEQ ID NO: 660 - DNA, 378 bp, Homo sapiens
  misc_feature 54, 62, 114, 144, 150, 213, 250, 282, 297, 317, 337, 367: n = A,T,C or G
gccctctagatgcatgctcgagcggccgccctttttttttttttttttttatanagctaatnggcttttatttgtgatttatgaattaaagcagcaccactctacaagtacagngatagctccccctgggcaatacaatacaanaacagngggttttgtcaaattggaacaaggaaacagaaccacagaaataaatacattggttaacatcanattagttcaggttacttttttgtaaaagttaaagtanaggggacttctgtattatgctaactcaagtanactggaatctcctgngttctttttttttttaaatnggttttaattttttttaatnggatctatcttcttccttaacatttcagtnggagtatgtag

SEQ ID NO: 661 - DNA, 486 bp, Homo sapiens
  misc_feature 2, 215, 444: n = A,T,C or G
cnactcatatagggcgattgggccctctagatgcatgctcgagcggccgccctttttttttttttttgacttttaaggtaataatatatattactaaatatattatagtctacttataataattatatcgtcgttttcaatattacaaaaaaaggaagaaaaatacaagggaagcagacgacccaatatatataaatactataaaatcatattanaataaataaagtcgtcataaataaagggcccattgatttatgggtggggtttggcaacggctttggctacttgcttttggagggtaatttgagcaccaggattccccctcaggagaggttccagttaccaggagacactggaacctcaggtctataaaaactggaggggcagtgaaggcctattattcacagcacataagattctaggagacagatttgggcagggaanaggtgggggagagggttcattgcctcccttaaatatgctaca

SEQ ID NO: 662 - DNA, 542 bp, Homo sapiens
  misc_feature 15: n = A,T,C or G
aattgggccctctanatgcatgctcgagcaccgtcattaccccgagcacctgcagccccaggaagtcctggccgtcctcgctcaccaggagcccctcttggacccatgggtccaggagctccattttcgcctggaagaccattttcaccctttaatccaggagcacctgtttcacccttttctccatttcgtccatcgaagcctctgtgtcctttcataccagggaatccaggtatcccagctggacctttgatacctggaggtccaggcaatcctcgctctccaggtcgtccgggtctacctgattctccatcttttccagcaggaccagatggacctatagcaccaggaggtcctggagggcctgaaggaccagcttgcccaggttcaccagggggtccttggtatcctggagatccaggggaaccaggatgaccagatgtaccagggggaccgggagggcctggggggccagctggtccaggatagcctgcgagtcctcctactgctactccagacttgacatcatatgaatcatactg

SEQ ID NO: 663 - DNA, 437 bp, Homo sapiens
  misc_feature 190: n = A,T,C or G
ctatagggcgaattgggccctctagatgcatgctcgagctccttggcgagcacgtgaccccggcgggcacgcaggagggcaggcaggcccctgcgcaggcgctgggtggactgcttccaggtgtcatattggaagaacttgcccacggggtatctggggaagttgtccggaagcacggtcggaggggtcnacacgtccctctcggacttggcgggggtagcacagtacgtctccaggagggccaggtcacagctgcggaaacagcactcctcaacgatgccacggctgcgacggctcacacggcttgcgggcctgctgaagtagaagccgcggtccccacagacgaactggagggtgtccaccagctccccgccgcacagggtctcactggggcggtaagcagcaatgcagcacgaggcgaaggccaagaaggtgag

SEQ ID NO: 664 - DNA, 565 bp, Homo sapiens
  misc_feature 543: n = A,T,C or G
gcatgctcgagtcggccagctggatctcccacaaggtttccttgttaaaagggtgcttaagtaacctggccggcagcacgacttatgatgaagcacgaagaagccaggttctgtgtcgatcactctctcagtcccctcaactgctcatcttaaactatttggttcctgacacgtttccaaaaggggaaaggggaaaaggggaaggggggaaggggaacataaaaagtatttgttacatttaaaaagggggggaaggggaaagagctgtatctatgttcacctcattcaacttccttgagttatggcactatgatgttgcttaattaggtaagacatggatatttgcaccgagtgcaaatactgttcataacaaggtcatagctagaaagacagatgggctcaagtgtggacaaataatgtcatcaaggtaatagatcaaaaatattaaagccctataaaagatctgagcagtcaactccaaaacatccacatgacaaagtccttaaaatacaaatctcattactcttactcatgcaactgctnaaaaatagtgtgcagatatgta

SEQ ID NO: 665 - DNA, 561 bp, Homo sapiens
  misc_feature 511: n = A,T,C or G
tacgactcacttatagggccgaattgggccctctagatgcatgctcgagtctttaatataaccccaaatgaaagaaccaaggggaggggtgggatggcacttttttttgttggtcttgttttgttttgttttttggttggttggttcgttattttttaagattagccattctctgctgctatttccctacataatgtcaatttttaaccataattttgacatgattgagatgtacttgaggcttttttgttttaattgagaaaagactttgcaattttttttttaggatgagcctctcctagacttgacctagaatattacatattcctccagtaagtaatactgaagagcaaaagagaggcaggattggggtcacagccgcttcttcagcatggaccaagtgggccttggggattgcagcgttctcgaagtggctgtaggactcgaatttacagaaagccacagaggtgcaacttgaggctctgctagcaagccaccagtgaggctattngggtaaccacctttctatacaggagattggaatctactttgtcatttatc

SEQ ID NO: 666 - DNA, 639 bp, Homo sapiens
  misc_feature 169, 334, 339, 390, 588, 590, 595, 630: n = A,T,C or G
cttttttttttttttttaatttaaaaaccatttaatacacaaagtgaaaaactattagaatataaaagcatttcacattttttaagacaaataatatcttctaaattacttagcagatgatagaggtccacagtcctttctctgaaacccttggggcaagttgtttcanaattatgaaattttagattttagaaaagtagttttgtgcatataccatactacattaaccagccctcaccacagtctgtggcagcagccctccctctcatcatcaagcagcaaaataaaggaatattcacactaaatgggataaaaagattcaaggtcagttcanattanattgcaagcaaatgaattttgtcaccaagcttatggaaaccttgttttcanagctttttggattttggaattacaattacagataaaggagtgcagacctttataaatttgtatgacaagacatgaaagattgtttaaacaaatgactcatttttacaaatgaaaaaacatgtaattttcaaatacattataaattaacaggcatcttctctttgatattattaaatgtacatcttaaatacatatacncncaacnacatgatttatgaaagccaactaatattagaagcncagatacac

SEQ ID NO: 667 - DNA, 423 bp, Homo sapiens
  misc_feature 131, 260, 393, 403: n = A,T,C or G
gccctctagatgcatgctcgagcggccgcccttttttttttttttttttttaagaccctcatcaatagatggagacatacagaaatagtcaaaccacatctacaaaatgccagtatcaggcggcggcttcnaagccaaagtgatgtttggatgtaaagtgaaatattagttggcggatgaagcagatagtgaggaaagttgagccaataatgacgtgaagtccgtggaagcctgtggctacaaaaaatgttgagccgtanatgccgtcggaaatggtgaagggagactcgaagtactctgaggcttgtaggagggtaaaatagagacccagtaaaattgtaatgagcagtgcttgaattatttggtttcgggtgttttctattagactatggngagctcaggngattgatactcctgatgcga

SEQ ID NO: 668 - DNA, 484 bp, Homo sapiens
gccctctagatgcatgctcgagcggccgccctttttttttttttttttagttatagagctaattggcttttatttgtgatttatgaattaaagcagcaccactctacaagtacagtgatagctccccctgggcaatacaatacaagaacagtgggttttgtcaaattggaacaaggaaacagaaccacagaaataaatacattggttaacatcagattagttcaggttacttttttgtaaaagttaaagtagaggggacttctgtattatgctaactcaagtagactggaatctcctgtgttctttttttttttaaattggttttaattttttttaattggatctatcttcttccttaacatttcagttggagtatgtagcatttagcaccactggctcaatgcgctcacctaggtgagagtgtgaccaaatcttaaagcattagtgctattatcagttaccaccatttggggcttttatcctt

SEQ ID NO: 669 - DNA, 390 bp, Homo sapiens
  misc_feature 232, 336: n = A,T,C or G
atatagggcgaattgggccctctagcatgcatgctcgagcggccgccctttttttttttttttttagttatagagctaattggcttttatttgtgatttatgaattaaagcagcaccactctacaagtacagtgatagctccccctgggcaatacaatacaagaacagtgggttttgtcaaattggaacaaggaaacagaaccacagaaataaatacattggttaacatcanattagttcaggttacttttttgtaaaagttaaagtagaggggacttctgtattatgctaactcaagtagactggaatctcctgtgttctttttttttttaaatnggttttaattttttttaattggatctatcttcttccttaacatttcagttggag

SEQ ID NO: 670 - DNA, 318 bp, Homo sapiens
  misc_feature 11, 72, 119, 192, 195, 232, 234, 249: n = A,T,C or G
tgggccctctngatgcatgctcgagcggccgccctttttttttttttttttttttttttttttttttttttngctaaattcttttatttttgtttaaattttcacttcaattttaattnttgaagaacagcctcgacaacatatatcgcacccattataagaagcaaagggttatatcaaaaattattagtntanaatcacaggaaatctggtttggaacccgaaaaaaatncnaaacagattttgatnccttgaccccggacaattttttaaaattatttggaaaatgttattttcccctaattcttggttcctttt

SEQ ID NO: 671 - DNA, 570 bp, Homo sapiens
  misc_feature 522: n = A,T,C or G
ctttttttttttttttaagatatatctgtatttctttgtcgttgtttaaaaataaatatgtactacggaatatctcgaaaaactgcactagagacaaagacgtgatgttaatatcttttccccacaattattacggataaacagtagcaccaataaataaatgataacaaatattaaaattaaaaaaggagagagatttagtatgtagaattctctattttttcttgttttgtttttacatataaaaaacagaatagcaatgtctattttatcagaatcacatatatacataaacatatatatatatatatacacacaaatacaagttgccaaatatatatatagtatgtagatgtatattgaaaccttatttcaaaggaatgtgtgctggggagccaggggatcggggagggcagagctgagtgttagcaaaattaaatatctgttcaagataagctagtgactgtcaccgatcagggagagagagattggaaacatgaattttatatacaaaaaccggtncaaataagagagcaagagagagcaaaagatacatctcataaatagttg

SEQ ID NO: 672 - DNA, 691 bp, Homo sapiens
  misc_feature 12, 660, 661: n = A,T,C or G
tatacgactcantatagggcgaattgggccctctagcatgcatgctcgagctattggagtgagacgagcagcagcagctgtggaacccagcagctcccagaggtgctgcagtgccagccccagcattaccactgctaccatcagtcaagccaagcccagcagcctccagaaaaaaatgtagtgtatgagcgagtgaggacctacagtgggcccatgaacaaggtggtgcaggccttggaccccttcaactcacgggaagtgctctcccctctcaaaaccacctcctcctaccaaaatttggtttggagcgaccattctcaggaactccattctccaactttaaaaatatctacatgtgccccaagtactctacatataacccaaaatactgaacaggaacttcattctccaacagtgaaacttactacatatccacagaccactattaggaaatatgtagtacaaaatcctgaacaggaaccactgtctcaattcctaagaggaagccatttcttcccaggaaacaatgttatttatgaaaaaacaataagaaaagtggagaagctaaatactgatcaggggtgccatcctcaggctcaatgccatcatcacattatccaacagccccaggtcatccactctgcacactggcaacaaccnngattctagccagcaaatccaagccatcaca

SEQ ID NO: 673 - DNA, 511 bp, Homo sapiens
  misc_feature 13, 450: n = A,T,C or G
tgggccctctagntgcatgctcgagcggccgccctttttttttttttttttttagtaaatatatgttttatttgtcaagagtaaatgtcagttttatttagaatattcaagtacaaaaaatgaaaatgtatatatctatgactgttaagaaatgttagaaatcattaaaatgttctgagaataccagtaaggcactgaatgcaaataccacctgaaatatgaattatgtgcatttttatatctttaatattcagatgttcatagttattttcttaaaaagtatttttaataaaatgattcaaccttattatttttaccctggaagacagagtttaaacaagtatgtaatgaaaagttttcctaatgaaagctgtgatacactcatgctcaaaggtactttatccttaggaaaaaacatccagatatataagctattttgtttcaccacantaatacgtcagccataatatgatgacttcatgctttattatgccttattgtcgacgcggcc

SEQ ID NO: 674 - DNA, 295 bp, Homo sapiens
ctcactatagggcgaattgggccctctagcatgcatgctcgagcggccgccctttttttttttttttcttgacccagttaaatttttattcagtgaaaaaagttgacattgagacaaaaattatcttaaagttgtgcaacaatacagtaaaaccttcagcagatttcagtgacttggaaacttatcgaggcaattgaaattataaatacttaatttcgctttggagagaaacaagtatacagtgtttcactttaaataagagtagaataggcctttattttgcgtcgacgcggcc

SEQ ID NO: 675 - DNA, 704 bp, Homo sapiens
  misc_feature 11, 12, 669: n = A,T,C or G
gtatacgactnntatagggcgaattgggccctctagatgcatgctcgagtctgtggcagagtaggctttaaatctgcaggtgatcccacaaacaccatctaagcaaatgactgggctctcctctccctccacaggatgctttaccagagttactgatgaagttcctcaaggacagttcttagccttccttcctccatgagcagattctggctttgggggacatgcaaaagatcaataaagcagaaagcaaaaaataaattagaggcctgaggaactacaaaactagataatcagcctctaagtaaatgggagttggccacactttgagattaacagagtaatgtatttgaaggaatgagtatagatctgcactgtctaatatggtagccactagtcacatttggctacaaagacttgaaatatggtgatggtttgaattgagatgtgtttaatacacactgaatttcaaaggcctaatatgaaaaaaagtaaaataactcattaataatttttatattgatcctatgttgaaatgatagtgtttttgagctattgggttaaataaaatatatttaaatcaataccatgggtttctttttacttttaaaaaaatgtggttactagaaacatttaaattacagatgtggctctcattatagtatttacagnggacagtgcatctctagatgcctataccctaatct

SEQ ID NO: 676 - DNA, 548 bp, Homo sapiens
  misc_feature 392, 438, 492: n = A,T,C or G
gtcgacaattcatactggagagaaaccataaaaatgtaagagtttgtgacaaggcttttgggcatgattcgcacctggcacaacatgctagaattcacactggagagaaaccttaccagtgtaatgagtgtggcaaagcctttagtaggcagtcaacacttgtttaccgtcaggcaatccatggtgtagggaaactttactaaggtaatgattgtcacaaagtcttcagtaatgctacaaccattgtgaatcactggagaatccataaggaagagagatcatactagggtaataaatgtggcagatttttcagacattgttcataccttgcagttcatcggtgaactcaacgctggagagaaaccttacaaatgtcatgactgtggcaaggncttcagtcaagcttcatcctatgcaaaacataggagaattcatacnggagagaaacctcacatgtgtgatgatagtggcaaagccttcactttacacctnatgagacatcagagaatgcatactggacagaaatcttacaaatgtcatcaatgtgc

SEQ ID NO: 677 - DNA, 570 bp, Homo sapiens
  misc_feature 25, 170: n = A,T,C or G
actacggaatatctcgaaaaactgnactagagacaaagacgtgatgttaatatcttttccccacaattattacggataaacagtagcaccaataaataaatgataacaaatattaaaattaaaaaaggagagagatttagtatgtagaattctctattttttcttgtttngtttttacatataaaaaacagaatagcaatgtctattttatcagaatcacatatatacataaacatatatatatatatatacacacaaatacaagttgccaaatatatatatagtatgtagatgtatattgaaaccttatttcaaaggaatgtgtgctggggagccaggggatcggggagggcagagctgagtgttagcaaaattaaatatctgttcaagataagctagtgactgtcaccgatcagggagagagagattggaaacatgaattttatatacaaaaaccggtacaaataagagagcaagagagagcaaaagatacatctcataaatagttgaaattaaatattaaccaagaatactgaaaaaaaaccctactctttaattaaattaactgtt

SEQ ID NO: 678 - DNA, 655 bp, Homo sapiens
  misc_feature 6, 7, 31, 288: n = A,T,C or G
cgactnntatagggcgaattgggccctctanatgcatgctcgagcggccgccctttttttttttttttactttgacaacaaattatattttaaatgtttcatatttacttttatatttccatacaatcagaaacagtaaaaaaaatttggagagcacataaaaacatcttaaagttaaaaatataaagccttgtatttaaaaatgcagtcatttaaataatattataagaatctatttgtacataataaacaagtttcaaccagcaagaaattactaatattgactgnggagttttggctgttttaatagttctaactcattattccgtaattcaacacagcactaccaacacagctggcaatgacaagactgggagtatcaaactaggattgttagttcaattaaaatttcagataaacaataatgtacttatactaaaaaattatttgttgtttatctgaaatgaaaatttaactgggtacccaattgtttgtttgtttaatctaaaaaccctgattgaaatttatctaataaaacatcatttaatatctaaaataaaataaatttactataacatctttataactattcaatcaatgattcatcttctatttttccaaattcttgcacaaatatttgatgcttaaataaata

SEQ ID NO: 679 - DNA, 477 bp, Homo sapiens
  misc_feature 215, 242, 305, 344, 448: n = A,T,C or G
ctttttttttttttttttgcagttatttttaaaactttattttaaaaatatgagcatctattttaaaagttttgataattattgccattattttcttgtgattggtacaatttaaaaataagtctatgttttcacattgattttaaaaaatatagcatgtttgaattacaaatgattaagcaaactctattacttcatagctgaccatcttccanaaaattcccacttaattgaatacttanaaaaaaatggccagtggccgattgaaaggtatattaaaattaagggcagttttaattctgaanacaaatatcttcatggaaatctatttgtaagcttctganattgctgctgaaagtctacagtctgtgaatataccaattcccctttacaactgatgcagatcattatgaaatactggaaggcataccctacaatttaggaattngtgtggctgccactgctatgctctcaatt

SEQ ID NO: 680 - DNA, 63 bp, Homo sapiens
ctatagggcgaattgggccctctagatgcatgctcgagcggccgccctttttttttttttttt

SEQ ID NO: 681 - DNA, 703 bp, Homo sapiens
  misc_feature 2, 11, 699: n = A,T,C or G
tntacgactcntatagggcgaattgggccctctagatgcatgctcgaggatcaaacagagcatactgaatcagcaggactggctggtggtgcagcagacatcatgagtaagcaccgagaagtctgttccttatcacgtgtgtaaggggaaaaaggtttaaacaagtctcttaagtggtgtttcctcaccgatggagaattacttccaagcagaagcttacaacctggacaaggtgttagatgaatttgaacaaaacgaagatgaaacagtttcttctactttattggatacaaagtggaataagattctagatcccccttctcaccggctgtcatttaaccctactttggccagtgtgaatgaatctgctttctaatgagtcacaaccacaactgaaagtcttctccctggctcattcagctcccctgaccacagaggaagaggatcactgtgctaatggacaggactgtaatctaaatccagagattgccacaatgtggattgatgaaaatgctgttgcagaagaccagttaattaagagaaactatagttgggatgatcaatgcagtgctgttgaagtgggagagaagaaatgtggaaacctggcttgtctgccagatgagaagaatgttcttgttgtagccgtcatgcataactgtgataaaaggacattacaaaacgatttacaggattgtaatnatta

SEQ ID NO: 682 - DNA, 616 bp, Homo sapiens
  misc_feature 2: n = A,T,C or G
cnactcactatagggcgaattgggccctctagatgcatgctcgagtttggcttgcccttctgggaacccggatctaggtttaaatggaacttaaaaacaccccagtacatgactgactgacagaacaattgtttgcatttatatatggtatatgttcataactttccgcgagggaatatgagagatacattattttataaaagccaaaaagcaaaattttaggtcacttctaaattcagtattctttatacttttttttctcccaattcagcattttaattctaactggagggaagtttggaaggaagttttttaaatcaaacccttctaaagatcatcttaatacaaaatgaagtttttacatagtatgaatgctgaacataatttgtattatttacttatagaagttaactgtcatacaaaaatgctttcctcttgttgattttgataccaaagtatgcttgtcatggaaaaaaagccagtttaatttacgctcttctcagtatttattattcagtaatactaaagtgttaataagcctctctctccccataaattttatcacctatggtttaattggacctcctagtttcaacatatgaacaaatcactatct

SEQ ID NO: 683 - DNA, 578 bp, Homo sapiens
tgggccctctagatgcatgctcgaggtggtggcagggccgccccctgcagtccggagacgaacgcacggaccgggcctccggaggcaggttcggctggaaggaaccgctctcgcttcgtcctacacttgcgcaaatgtctccgagcttactcacatagcatattggtatatcaaaatgaaatgcaaggaaccaaaaataacataattgaaggcagtaaaagtgaaattaaataggaagatcatcagtcaaggaagacccactggagaggacagaaaatgaagcagtgttttatcatgtgtatttcagcaggtcttcttgaaatttaactaaaaatatgactgctctctcttcagagaactgctcttttcagtaccagttacgtcaaacaaaccagcccctagatgttaactatctgctattcttgatcatacttgggaaaatattattaaatatccttacactaggaatgagaagaaaaaacacctgtcaaaattttatggaatatttttgcatttcactagcattcgttgatcttttacttttggtaaacatttccattatattgtatttcagggat

SEQ ID NO: 684 - DNA, 606 bp, Homo sapiens
  misc_feature 602: n = A,T,C or G
aattgggccctctagatgcatgctcgagcggccgcgtcgacgacagagtctcactctgtcaccaaggctagagtgcagtggcgtgatcttggctcactgcaacctctacctcctgggttcaagtgattctcctgcctcagcctcccaagtagctgggactacaggcgtgcactaccacgccagggtaatttttctatttttagtagagacaaggttttgccgtgttgaccaggctggtcttgaattcccgacctcaggtgatccacccgcctcagcctcccaaagtgctgggaccacaggcgtgagccactgggcctggccctatgtgggcatttctttcctccagtgtgtgggcatctgactgcggaatggtcctgtccatcagcacaagctctatagtgaattccttatatggttaatagggtgagcagtcattccagttttcatggaactaagaggtttcccaggacataggactttcagtcctaaaaccaagtcagtcgtgggcaaaccaggacagtttgtcatcttagtggtaaagcagattcttaatctgtactttttctccccagagggcctagagcatgttgaaaaaataaggntgtg

SEQ ID NO: 685 - DNA, 541 bp, Homo sapiens
  misc_feature 180, 329, 376, 415, 432, 444, 531: n = A,T,C or G
tgggccctctagatgcatgctcgagcggccgcccttttttttttttttttctttgctcacatttaatttttattttgattttttttaatgctgcacaacacaatatttatttcatttgtttcttttatttcattttatttgtttgctgctgctgttttatttatttttactgaaagtganagggaacttttgtggccttttttcctttttctgtaggccgccttaagctttctaaatttggaacatctaagcaagctgaagggaaaagggggtttcgcaaaatcactcgggggaagggaaaggttgctttgttaatcatgccctatggngggtgattaactgcttgtacaattacgtttcacttttaattaattgngcttaaggctttaattaaatttgggggttcccttcttanagcagctcgtactgacnaaggtgcatgcnctgaatgatgtcacggcagtcgttgaacacacggcggatgttctcagtgtccacagcgcaggtgaaatgagggtagcagtagtgacncccatctcca

SEQ ID NO: 686 - DNA, 474 bp, Homo sapiens
  misc_feature 423: n = A,T,C or G
gggatttggagcggccggggaggcgggggtggccggggccggcttggaggcctggcgccacccttcggggcctgcaaggacccagttgggggggcaggagggggccggaggatggttggttgtgggatttctactttgccttttcctccttatgccgccttagtgaggggcgggagctctggcggcagccccggggtggggagacgagctccggagtcggaagagctgggttttcttccgggcctagccaccagttggcggagtgaccttaggcgagtcactctgtaatttgtctgcgcctcagtttcctcctctgcctatcaatgtgtgtggggttgaaatcgctttgtaaactataaagcgtgggtgtacgtaaaggatggttattgtttataattttttttgagttgtaagaaaacttancagttccccaatccttgggttttgaacctgggaaccttggattggagttgg

SEQ ID NO: 687 - DNA, 757 bp, Homo sapiens
  misc_feature 2, 751: n = A,T,C or G
cncactatagggcgaattgggccctctagatgcatgctcgagcggccgccctttttttttttttttactttgacaacaaattatattttaaatgtttcatatttacttttatatttccatacaatcagaaacagtaaaaaaaatttggagagcacataaaaacatcttaaagttaaaaatataaagccttgtatttaaaaatgcagtcatttaaataatattataagaatctatttgtacataataaacaagtttcaaccagcaagaaattactaatattgactgtggagttttggctgttttaatagttctaactcattattccgtaattcaacacagcactaccaacacagctggcaatgacaagactgggagtatcaaactaggattgttagttcaattaaaatttcagataaacaataatgtacttatactaaaaaattatttgttgtttatctgaaatgaaaatttaactgggtacccaattgtttgtttgtttaatctaaaaaccctgattgaaatttatctaataaaacatcatttaatatctaaaataaaataaatttactataacatctttataactattcaatcaatgattcatcttctatttttccaaattcttgcacaaatatttgatgcttaaataaatacataaataataaataggttaataagttacacttgaaaataatttatgttatgatgaaaaaacttaaagtgcttccacatgtcctcacaacatcactgngaggga

SEQ ID NO: 688 - DNA, 560 bp, Homo sapiens
  misc_feature 69, 108, 145, 175, 236, 247, 268, 301, 335, 345, 360, 363,385, 416, 424, 429, 488, 520, 527, 528, 550, 552, 555: n = A,T,C or G
atgcatgctcgagcggccgcccttttttttttttttttttttttttttttttttatctttctatgcagntttttattttcaaattattaacaacatgtcatttctaanattttaataaattcgctgtcacacatgaaacacactntgctcactgttaaaatacatcatatgccanaaactaaaattgcaaccttttgtttaaaatttaaaacactatgctcatcaaaaaatccatntgttacccggnaatttttaacatagtaattanactaaatgggatctcattttatagttagaatgnaaatgttgacattaaaaggaaagcaaaatagttnttatcatggnaaggaatcataaggngtncaataaattatgtaatacatanatttttcagtaacaaaaacaaagtaaactgntcaacctntgganattcaaattttgtttttaaaaataaacaattattgaatagagtagcatattcctagctnttacataccacatatgtcaaaaatgtttcaanaaattgnngggctctgataacttagggcgncnacncggcc

SEQ ID NO: 689 - DNA, 698 bp, Homo sapiens
  misc_feature 37: n = A,T,C or G
gtatacgactccctatagggcgaattgggccctctanatgcatgctcgagggatagcagcagatggtgctaatgcccttcttccagctaacagagctatggcctatctgaagattcagaaatatgaagaagctgaaaaagactgcacacaagccattttattagatggctcatattctaaagcttttgccagaagaggaactgcaagaacatttttgggaaagctaaatgaggcaaaacaagattttgaaactgttttacttctggaacctggaaataagcaagcagtaactgaactctccaaaattaaaaaggaattaattgagaaaggacactgggatgatgtctttcttgattccacacaaagacaaaatgtggtaaaacccattgataatccaccgcatcctggatcaactaaaccactcaagaaggttattattgaagaaactggtaatttgatacagactattgatgtgccagatagcactactgctgctgctccagagaataatcctattaatctagcaaatgtaatagcagccacaggcaccacaagtaagaagaattcaagccaagatgacctttttcccacaagtgatactccaagagcaaaagtattgaaaatagaagaagtcagtgatacttcatccctgcaacctcaagccagtttgaagcaggatgtatgtcagtcttacagcg

SEQ ID NO: 690 - DNA, 645 bp, Homo sapiens
  misc_feature 9, 237, 304, 337, 414: n = A,T,C or G
gccctctanatgcatgctcgagcggccgcgtcgaccagagagaagcgtggggaagagtgggctgagggactccactagaggctgtccatctggattccctgcctccctaggagcccaacagagcaaagcaagtgggcacaaggagtatggttctaacgtgattggggtcatgaagacgttgctgttggacttggctttgtggtcactgctcttccagcccgggtggctgtcctttanttcccaggcctaaatgtgactgtgaacgctactttcatgtattcggatggtctgattcataactcangcgactgccggagtagcacctgtgaaggcctcnacctactcaggaaaatttcaaatgcacaacggatgggctgtgtcctcatagggccctcatgtacatactccaccttncagatgtaccttgacacagaattgagctaccccatgatctcagctggaagttttggattgtcatgtgactataaagaaaccttaaccaggctgatgtctccagctagaaagttgatgtacttcttggttaacttttggaaaaccaacgatctgcccttcaaaacttattcctggagcacttcgtatgtttacaagaatggtacagaaactgaggactgtttctggtacctt

SEQ ID NO: 691 - DNA, 312 bp, Homo sapiens
  misc_feature 6: n = A,T,C or G
ctagangcatgctcgaggttctctgtcatctctgtggtctctagaagagctctgatcctgttcatattctcgttcttctcttgagtccttttctctgtctcgtttgcccctagtatcttccctcctttcgtggcgtcgatcatgagactgtgaagttcgttcatgatcatgtctccctttctctcgcattggagagcgatgtcttggaggactctgctttctctggggagacgacaaagaatgtgaaggataaggagaggcagagcgtcgtaaaggtggagttagtgtccgctgataagatggtgaaggagt

SEQ ID NO: 692 - DNA, 244 bp, Homo sapiens
  misc_feature 24, 74, 121, 177, 235, 237: n = A,T,C or G
tatagggcgaattgggccctctanatgcatgctcgagcggccgccctttttttttttttttttttttttttttnaagcactcatttttataaaaatgtgttttattgttttaaaacaagtntataaaagtagaaatcacatacaaaaatacagattactctgacatgttggcaaaanagcttatggctggacttgagtttggaagttctgtatgtttgagggcatccgatgtcanantccaacc

SEQ ID NO: 693 - DNA, 470 bp, Homo sapiens
  misc_feature 201, 270: n = A,T,C or G
ctttttttttttttttttaaagtcccatttttattttcttaattcaggaagagttttctttttagaaaaaaatactttaatcaggctttcaacaacattatccatgggtcagtggctgatactattattcctatttttcaggaggtggctggtctctccttgatttttgtttttgtttttgtttttgttttaaggttttanactgattgctatttgggcattaaaggagccataataaataatccatgcccactttaggttatctggtanatccacagaaattttaaataggaggagagttaggtaagatcgacactatcaatgaccattttagaactggggggaaaaaatccccacaacaaccctgaaatgtcttctgtcattacagtttcaaaaactagagagagaaaaaaagaaggctactactttacccagggttcctgtagtggtgatggctttcgaaaggggcg

SEQ ID NO: 694 - DNA, 581 bp, Homo sapiens
  misc_feature 35: n = A,T,C or G
tatacgactcctatagggcgaattgggccctctanatgcatgctcgagtggtattatgaggcctcaggtgccttggggtacattgtcatgctataagggatgtatatcataaggtatggtggaagaggggccttatgtgaatgattgccacatactgtttctgttgctgctttttttccgattcctttttgtcattggatttgtttgttttgtcatgtggtgaatggtgttttagttattgtgttgctgccagaatcagaatccagttcttgttcttactgccttatagttattgtgttgccaccagaatcagaatccagttcttgttcatactgccttgtagtgagggcagtttaatatctacaaagaagcttttagaagctgaaaaagtcaatgtgattgtgcattctgcttttaagaagctgtttcagctatgaactgtgtatgtgctataagtgtgaggtaccataagttatttaatttttaaaagaggaaactcctgagtgagctgtttaagaaatctgagtgtgatctattgttacgttatttataactaggtaaaatgtctgtcgtgatagatt

SEQ ID NO: 695 - DNA, 604 bp, Homo sapiens
  misc_feature 22, 335, 339, 414, 466, 546: n = A,T,C or G
tagggcgaattgggccctctanatgcatgctcgagcggccgccctttttttttttttttttttttttagggtattaaataatttgtttattgtacggcatttacaaagaaaacagacaatgccctcagtagaaagaataaaaatgtatttagggctttatttttaactgacagcaaatagaaatcctttagtgagatcgtggcaatttgacagtattataattaagctcaataaaggtacatggggtacctggaagatcaagatctacagctgcctatttccacatctttcaatccatctggctccttaaataggggaaaaagcccttatttggngganaagcatttccaaaatgaagttacaggttctattaaaacttactgtcacatcaactgttaaaatagggccttttgngttttgttatttcaccttaatatcaccagaattcctgtaattccacaattgngattttactatgtagaagataattcagttctagtctattgctttagatgtaaaaacagctgaaaacccaaagtggattanaattgctgaaggatttccctgccgttgtttgatacaatctattctcttgattcttgat

SEQ ID NO: 696 - DNA, 517 bp, Homo sapiens
  misc_feature 438: n = A,T,C or G
ctttttttttttttttttacactcagattgtttatttaaaaatgcccaaaacacaaaaatagacttttaaggtaataatatatattactaaatatattatagtctacttataataattatatcgtcgttttcaatattacaaaaaaaggaagaaaaatacaagggaagcagacgacccaatatatataaatactataaaatcatattagaataaataaagtcgtcataaataaagggcccattgatttatgggtggggtttggcaacggctttggctacttgcttttggagggtaatttgagcaccaggattccccctcaggagaggttccagttaccaggagacactggaacctcaggtctataaaaactggaggggcagtgaaggcctattattcacagcacataagattctaggagacagatttgggcagggaanaggtgggggagagggttcattgcctcccttaaatatgctacaattttttttcccccaagaacctcggaagacactccat

SEQ ID NO: 697 - DNA, 645 bp, Homo sapiens
  misc_feature 96, 548, 550, 592: n = A,T,C or G
cttttttttttttttttttacaataggccagtagaattcttatgagaacagcttttaagcacttcaatggagtgtcatttttttggtagcttccanaaggtgccaaacaggtttcaacatcatattaattagaaatacccataataattataacaacaataaaaaggtataatatggtacataaatatggaagagcagtttgtaatatgaatacattttctctagacgagatcacagttttattttgtaaatattacatttaagtatatatatacacacatatatgtacaactatatatacatgtgcatatatatgtaaatttatatttatatataatatctttatatagatagatatctgcagacaggttattgattatagagacccaagaaagcaactcaataattgttcaaagttttcctcactgactgctggtgtgtagtttaagaagcccccatttgtttgcactcagaatgccttatcttcttttaatggaacacttgatgtggaattttaagtctgagaagtgaggtgccttctgaagaananattttagagactcccttcctctataagttggaaatgaccagnagtcttaagtagacgacagttagctgactttgacattgtaggacgtaatcagc

SEQ ID NO: 698 - DNA, 649 bp, Homo sapiens
  misc_feature 2, 31: n = A,T,C or G
cnactcctatagggcgaattgggccctctanatgcatgctcgagtcggccagctggatctcccacaaggtttccttgttaaaagggtgcttaagtaacctggccggcagcacgacttatgatgaagcacgaagaagccaggttctgtgtcgatcactctctcagtcccctcaactgctcatcttaaactatttggttcctgacacgtttccaaaaggggaaaggggaaaaggggaaggggggaaggggaacataaaaagtatttgttacatttaaaaagggggggaaggggaaagagctgtatctatgttcacctcattcaacttccttgagttatggcactatgatgttgcttaattaggtaagacatggatatttgcaccgagtgcaaatactgttcataacaaggtcatagctagaaagacagatgggctcaagtgtggacaaataatgtcatcaaggtaatagatcaaaaatattaaagccctataaaagatctgagcagtcaactccaaaacatccacatgacaaagtccttaaaatacaaatctcattactcttactcatgcaactgctaaaaaatagtgtgcagatatgtatttatatttgccttaaccttcaaaatctagggacataaatcttgtctttgt

SEQ ID NO: 699 - DNA, 609 bp, Homo sapiens
  misc_feature 34: n = A,T,C or G
tacgactcactatagggcgaattgggccctctanatgcatgctcgagagagctacctttttccttttatgtataaggacacagctagaaaatgccatgtatgatccagaggcctaatttgttgatcccttaatcttggacttcccaccattgagaacagcgagaaataaatttctgttgtttataagctgccaagttcatagtatttcattacagcagcctgcacagaccaaggcagtatttttttttaatgtcttctaagggaacccccccaaaagtaaacaaaaatctacaaaagttatttgtatgatcaaaatcaaaacattcttattcacgaaatagaagctacagtaaattttcaaaaaataagagttaaaaaactccccccatatgatatattttacagtttcacaagggtaccaggtcgtgaaggaattttattaaatctattaaatcatagatagcttttaataagttcaattttactttaagagctaataagttacttgatattaacctttttacttataaggtaagtgggagatatgacatcataatcttagacatttaaaaaatcctgagaaagattatttcaatcttttacagtttg

SEQ ID NO: 700 - DNA, 652 bp, Homo sapiens
  misc_feature 31, 91, 286, 581, 599, 629: n = A,T,C or G
cgactcatatagggcgaattgggccctctanatgcatgctcgagcggccgcgtcgacattcgggccgagatgtctcgctccgtggccttanctgtgctcgcgctactctctctttctggcctggaggctatccagcgtactccaaagattcaggtttactcacgtcatccagcagagaatggaaagtcaaatttcctgaattgctatgtgtctgggtttcatccatccgacattgaagttgacttactgaagaatggagagagaattgaaaaagtggagcattcanacttgtctttcagcaaggactggtctttctatctcttgtactacactgaattcacccccactgaaaaagatgagtatgcctgccgtgtgaaccatgtgactttgtcacagcccaagatagttaagtgggatcgagacatgtaagcagcatcatggaggtttgaagatgccgcatttggattggatgaattccaaattctgcttgcttgctttttaatattgatatgcttatacacttacactttatgcacaaaatgtagggttataattaatgttaacatggacatgatcttctntataattctactttgagngctgtctccatgtttgatgtatctgagcangttgctccacaggtagctctagg

SEQ ID NO: 701 - DNA, 608 bp, Homo sapiens
  misc_feature 31, 550, 581, 603: n = A,T,C or G
gactcactatagggcgaattgggccctctanatgcatgctcgagcggccgccctttttttttttttttgacagtagagatgggcacgggggagggtcttgcgatgctgcccaagctggtcttgaactgctggccttgagtgatcctcctgccttggcctctcaaagtgctcggattacagtgtaagccacggaacccagccccatcatgcctttaagtgttcaatgcacagaatagatagaggccaatagtccatttcaatcagattttaaaaaaagtaatgcaaaagatgggagaatttattgctgttacttattatgcaataatttactttaaaatacttcaaatataaactgtgtaatggatgtgtgctgtgtaatttaacttcaatcttgttctgggggtaagttagtatttgaagcacctcaatcaggtggctaggaagatgctttaaacacttatctaaatatacgccagagtgttcatcagcataagggatattagtaatttttcactgatgaatgcagcctgaaaagtaggtggttgtctanacttttagaggcaaaatgcatgaaatgaggngtaagaatctggcaggtcgacncggcc

SEQ ID NO: 702 - DNA, 518 bp, Homo sapiens
  misc_feature 192, 391, 446: n = A,T,C or G
cttttttttttttttttggctctagagggggtagagggggtgctatagggtaaatacgggccccatttcaaagatttttaggggaattaattctaggacgatgggcatgaaactgtggtttgctccacagatttcagagcattgaccgtagtatacccccggtcgtgtagcggtgaaagtggtttggtttanacgtccgggaattgcatctgtttttaagcctaatgtggggacagctcatgagtgcaagacgtcttgtgatgtaattattatacgaatgggggcttcaatcgggagtactactcgattgtcaacgtcaaggagtcgcaggtcgcctggttctaggaataatgggggaagtatgtaggagttgaagattagtccgccgtantcggtgtactcgtaggttcagtaccattggtggccaattgatttgatggtaaganagggatcgttgacctcgtctgttatgtaaaggatgcgtagggatgggagggcgatgaggactaggatgatgg

SEQ ID NO: 703 - DNA, 415 bp, Homo sapiens
  misc_feature 30, 385: n = A,T,C or G
actcactatagggcgaattgggccctctanatgcatgctcgagctcatcagaagaaccttctcatgcctctcgacgactgtgtgatgtggacatagactacagaccttatctctgtaaggcatggcagcaactggtgaagcacaggatgtttttctccaaacaagatgattctcaaagcagcaaccaattttcattagtttcacgttgtttaaaaagtaacagtttaaaaaaacatttttttattattggagaaagtggggttgaattttgttgatatacatcataaaatagtcttttgcagggtactacgcaagccttaaaatttttcttaagacagagtcttgctctgtctcccaggctggagtgcagtggcacaatcatggntcactgcagccttgaactcctggcctcaag

SEQ ID NO: 704 - DNA, 613 bp, Homo sapiens
  misc_feature 524, 603: n = A,T,C or G
ctttttttttttttttttaactggtctatcctgcagtgaattttattgaattcaaaggtagtattcctatttgagaaatgaaaaactaaaatcaagttttacaagcaagcatcatgagataaagcagtgaagacgccttttcagatcacaccagagcagacaccagtttctaccccagcccacatgaagatgtttttattcaatacaaacagtaacagaggcaacacaatggccatagaatgagaacataagtgcatttgaattttttctgagttctggctataggctctgacaagcctatcattcttttcttaccaggtgaacagaaatcatctgctaatgccagaaactttaaagctcttaattcagctggaaacaactacaattgagggcctttatactagctacttgcttcccaatttagggttgcctagcaagttaatttcaacataacaaaaggtgtcatctgtctggccacagcatgcactagtgataggggcaggtttaatgagttttatgctcanatcgctgggtctcctggctgctcttgtccatctctgcaccttggtcctgagcattctgagactcagtcagctgaggatnaaagggacct

SEQ ID NO: 705 - DNA, 563 bp, Homo sapiens
  misc_feature 26, 353: n = A,T,C or G
cctatagggcgaattgggccctctanatgcatgctcgagtgcaagctggaggcagactgagtcctcggatgcttcggccagttctgactctagaggacaatacatacctctcatcaaagtagccagaacggattttactggcatctagatccgtggtgtgcttcattgtccgggggtcatatccattgtgtcgctcttggatcacagggtcaaacaggtcagcaaatacctcataggtctcctcatctccagccaccatgcccacagtcttgatgaaggggtggccagggttgtccacgccagtctggatacactgatctagcgtccaaccagtgggtgtggtcttgtcgcanagccgtgcatagactgctggggtcaggtgactggccatgcagttgttgtgctttcggaggtctgggtactcagcgctcgggggatacagcctccgtcgttcactggcagctcgtacaggttccggtcggagcagaaacccagcggctagagaccccgctccggccaaagccaggagcctgagtcccgggcgggcggacagcagacgggag

SEQ ID NO: 706 - DNA, 473 bp, Homo sapiens
gtcgacggaggaaccacctacttgttgcagattattcactatttttattttttcccccatgtatattaacttctgggttctggccttcaatggataaacaaacaaacaaaccctagacttagggccagggaaactgtccctgttcattttatttcttacacagccaaataaacttcttccctgaggctgagaatgttaaaacatgtgataatagagacagtcactccacatattgccgttctttttgaagatgctataaaattctaaaatcttctctgtggatctgtcattcaagaaagccttaactggggattcaaattatacctctgtgttaaacatctgttcctttagttattttccacaatagtgcctttttaaataattatttgatgctctaaatatactgttaaatattatgcaagcattttagattttgtttgggggacataaagaggattgaaatgattttaata

SEQ ID NO: 707 - DNA, 577 bp, Homo sapiens
  misc_feature 343, 400, 403, 444, 448: n = A,T,C or G
cttttttttttttttttactttgacaacaaattatattttaaatgtttcatatttacttttatatttccatacaatcagaaacagtaaaaaaaatttggagagcacataaaaacatcttaaagttaaaaatataaagccttgtatttaaaaatgcagtcatttaaataatattataagaatctatttgtacataataaacaagtttcaaccagcaagaaattactaatattgactgtggagttttggctgttttaatagttctaactcattattccgtaattcaacacagcactaccaacacagctggcaatgacaagactgggagtatcaaactaggattgntagttcaattaaaatttcagataaacaataatgtacttatactaaaaaattatttgntgnatatctgaaatgaaaatttaactgggtacccaattgtttgnttgnttaatctaaaaaccctgattgaaatttatctaataaaacatcatttaatatctaaaataaaataaatttactataacatctttataactattcaatcaatgattcatcttctatttttccaaattcttg

SEQ ID NO: 708 - DNA, 701 bp, Homo sapiens
  misc_feature 588, 679: n = A,T,C or G
tgcatgctcgagcggccgccctttttttttttttttagtaatactttaaatgtatcttgttgattattttatattttatcaacaaattttaaatctcttttagaataagacagaatattatatttaattaaaaaataaaaataataagtgtttttaacatagaattctgaattgattttatttatgtaggagagagagagatgttgaatatactagtcataaattactctatatttttctttatactccatgcatattaagattacaagtgtataattaaaggaaaatgattattgggggtagaggaatggccgtttcacactctctttgttgaactataaatgaatataaattttcttgagaacaatttagaagtaatgaacaaagaacttcttaaaacttcctataatttaaccaaatatttttatattgaataatttattccaagtcaataattagaatggtagaaaaggatttacatgcaattatgccttgcagcacttattataacacaaaaaaattaaaaataaaaaaataattataatggggtttccaaataatggccttctatgtagccattaaaattgngatttaaataaatatgcatttaattatcaggagatgtattcacagttaataacttgtattatttaaatggatttgacactacaagacaganatttctttctctagttaacctc

SEQ ID NO: 709 - DNA, 634 bp, Homo sapiens
  misc_feature 5: n = A,T,C or G
ctcantatagggcgaattgggccctctagatgcatgctcgagcggccgcgtcgactgtggccttagctgtgctcgcgctactctctctttctggcctggaggctatccagcgtactccaaagattcaggtttactcacgtcatccagcagagaatggaaagtcaaatttcctgaattgctatgtgtctgggtttcatccatccgacattgaagttgacttactgaagaatggagagagaattgaaaaagtggagcattcagacttgtctttcagcaaggactggtctttctatctcttgtactacactgaattcacccccactgaaaaagatgagtatgcctgccgtgtgaaccatgtgactttgtcacagcccaagatagttaagtgggatcgagacatgtaagcagcatcatggaggtttgaagatgccgcatttggattggatgaattccaaattctgcttgcttgctttttaatattgatatgcttatacacttacactttatgcacaaaatgtagggttataataatgttaacatggacatgatcttctttataattctactttgagtgctgtctccatgtttgatgtatctgagcaggttgctccacaggtagctctaggagggctgg

SEQ ID NO: 710 - DNA, 644 bp, Homo sapiens
  misc_feature 3, 246, 311, 559: n = A,T,C or G
ctnctatagggcgaattgggccctctagatgcatgctcgagcggccgccctttttttttttttttttatagatacaattggcttttatttgtgattcatgagtcagggcagtttccattctgcaaaatatagtgatagctcctactgggcaatacaacagtagaacagtgggttttgtaaaatgggaatccaggaacagaagaatataaataaattgatttaaataaactgattggttaatttcanaatacttcatattacttttttctaagagttaaagcagaaaggactttcttactgtgctgactcanacagcctggactctcatgtttttaggaaaattttgtctgttctgggatctacctgcttcctcatgtttcagtgtgagtatatggcatttagcatgactggctccattctggagtcaccaggctgtcacctaaatgagagtttgactaaacataaggcattaacactactgtcagttaccatcattttggacttccatcattcataggttatgatgtcctcctaatcatacatttatttgagtttttgncattccagccaaagagagaatatttgacatttgacgaatggctgcatgcaaacatttaaaggttttagagaatacagcacaccag

SEQ ID NO: 711 - DNA, 178 bp, Homo sapiens
  misc_feature 24: n = A,T,C or G
cttttttttttttttttttgttgntttttttttgttttagttcagtttattttttaatatgtcctgagttctttctgttcataaaattatgatcttatgacagctgtaacttttaattaataatattaacaaatcattattgatataggcttttcaatttgctcaagattaggaattg

SEQ ID NO: 712 - DNA, 158 bp, Homo sapiens
gccaactcacacaaggcaggtgagtgaggaaatccagagttgccatggagaaaaatccagtgtcagcattcttgctccttgtggccctctcctacactctggccagagataccacagtcaaacctggagccaaaaaggacacaaaggactctcgaccc

SEQ ID NO: 713 - DNA, 96 bp, Homo sapiens
actcctatagggcgaattgggccctctagatgcatgctcgagcggccgcccttttttttttttttttttttttttttttttttttttttttttttt

SEQ ID NO: 714 - DNA, 410 bp, Homo sapiens
  misc_feature 145, 229, 234, 324, 382: n = A,T,C or G
cttttttttttttttttgaagaagaaaatcctttattttttgatgagcaaaaataataaattgctgttcacactggataagaccatatcaaaagtgacagtaaacatgtacactgttggtgttatatggggatggggttctcggnaattttgtttattatttatgtttattattatgttttatcattaattattcaataaatttttatttaaaaagtcaccctacttanaaatnttctgtgggggtgggagggacaaaagattacaaaccaaaactcaggagatggtaacactggaattgataaaatcacctgggattagttgnataactctgaaccaccaaacctctgctatcaagccttgctacagtcatggctgtccanaaagatttacagttatttttctgagaaa

SEQ ID NO: 715 - DNA, 683 bp, Homo sapiens
  misc_feature 658: n = A,T,C or G
atagggcgaattgggccctctagcatgcatgctcgagtctgtggcagagtaggctttaaatctgcaggtgatcccacaaacaccatctaagcaaatgactgggctctcctctccctccacaggatgctttaccagagttactgatgaagttcctcaaggacagttcttagccttccttcctccatgagcagattctggctttgggggacatgcaaaagatcaataaagcagaaagcaaaaaataaattagaggcctgaggaactacaaaactagataatcagcctctaagtaaatgggagttggccacactttgagattaacagagtaatgtatttgaaggaatgagtatagatctgcactgtctaatatggtagccactagtcacatttggctacaaagacttgaaatatggtgatggtttgaattgagatgtgtttaatacacactgaatttcaaaggcctaatatgaaaaaaagtaaaataactcattaataatttttatattgatcctatgttgaaatgatagtgtttttgagctattggggttaaataaaatatatttaaatcaataccatgggtttctttttacttttaaaaaaatgtgggtactagaaacatttaaattacagatgtggctctcattatagtatttacagnggacagtgcatctctagatgcctat

SEQ ID NO: 716 - DNA, 616 bp, Homo sapiens
  misc_feature 221, 291, 356, 385, 393, 466, 499, 515, 550, 589: n = A,T,C or G
cttttttttttttttttagttatagagctaattggcttttatttgtgatttatgaattaaagcagcaccactctacaagtacagtgatagctccccctgggcaatacaatacaagaacagtgggttttgtcaaattggaacaaggaaacagaaccacagaaataaatacattggttaacatcagattagttcaggttacttttttgtaaaagttaaagtanaggggacttctgtattatgctaactcaagtagactggaatctcctgtgttctttttttttttaaattggntttaattttttttaattggatctatcttcttccttaacatttcagttggagtatgtagcatttancaccactggctcaatgcgctcacctaggngagagtgngaccaaatcttaaagcattagtgctattatcagttaccaccatttggggcttttatccttcatgggttatgangttctcctgatgacacatttctctgagttttgnaattccagccaaaganagaccattcactatttgatggctggctgcatgcanacatttaaagcttttagagaatacactacaccagggagnatgactactagtatgactattaggagg

SEQ ID NO: 717 - DNA, 114 bp, Homo sapiens
ctcactatagggcgaattgggccctctagatgcatgctcgagcggccgcccttttttttttttttttttttttttttttttttttttttttttttttttttttttttttttttt

SEQ ID NO: 718 - DNA, 588 bp, Homo sapiens
tgggccctctagatgcatgctcgagcggccgcgtcgaccagcatttcatatggctgagagagtcttttgatgtttacagtaactggtcctgtatgagaaatccttttagaggcagtatggggcagttgtgggcaagttaatatgtttctttttgttttaaatttagcctacacttttcctaattttttcatcttctgggcacaccacagttagaggaattttctgtagacccagaagatttgttatttttttaagtatttttttaagtatgtttaaaaaaatgggaagggatttgggaacacccagcttttgcatagagtctgttaggaaatcaggaagtgactgggaccaagccagtattggggtgaagggtggggagcgagtgaccctaactttgcttgtcctcacaggtattctgaggccagcttcctagctagatttcctgtttcttagattttttttttttttaaacaaaccgtttttggaggcagacactttaaacaccagagctaaaacctgagtgctgaacttgatcaacccgcacaatttggaggcttctggaaacccacactatgcacctctcgctga

SEQ ID NO: 719 - DNA, 574 bp, Homo sapiens
attgggccctctagatgcatgctcgagtcggccagctggatctcccacaaggtttccttgttaaaagggtgcttaagtaacctggccggcagcacgacttatgatgaagcacgaagaagccaggttctgtgtcgatcactctctcagtcccctcaactgctcatcttaaactatttggttcctgacacgtttccaaaaggggaaaggggaaaaggggaaggggggaaggggaacataaaaagtatttgttacatttaaaaagggggggaaggggaaagagctgtatctatgttcacctcattcaacttccttgagttatggcactatgatgttgcttaattaggtaagacatggatatttgcaccgagtgcaaatactgttcataacaaggtcatagctagaaagacagatgggctcaagtgtggacaaataatgtcatcaaggtaatagatcaaaaatattaaagccctataaaagatctgagcagtcaactccaaaacatccacatgacaaagtccttaaaatacaaatctcattactcttactcatgcaactgctaaaaaatagtgtgcag

SEQ ID NO: 720 - DNA, 647 bp, Homo sapiens
  misc_feature 385, 567: n = A,T,C or G
ttgggccctctagatgcatgctcgagtctttaatataaccccaaatgaaagaaccaaggggaggggtgggatggcacttttttttgttggtcttgttttgttttgttttttggttggttggttcgttattttttaagattagccattctctgctgctatttccctacataatgtcaatttttaaccataattttgacatgattgagatgtacttgaggcttttttgttttaattgagaaaagactttgcaattttttttttaggatgagcctctcctagacttgacctagaatattacatattcctccagtaagtaatactgaagagcaaaagagaggcaggattggggtcacagccgcttcttcagcatggaccaagtgggccntggggattgcagcgttctcgaagtggctgtaggactcgaatttacagaaagccacagaggtgcaacttgaggctctgctagcaagccaccagtgaggctattgggtaaccacctttctatacaggagattggaatctactttgtcatttatccaccacagtgacaaaggaaaagtggtgccngttatgcaatccatttaactcataaacatattactctgagtaactggccagccattcatcggatccgagctcggtaccaa

SEQ ID NO: 721 - DNA, 209 bp, Homo sapiens
  misc_feature 27, 61, 63, 74, 111, 126, 150, 166: n = A,T,C or G
caaaagaaagcaaaaactaactgtcancataaacattaaagctcaccgttgattatagctnanggcctgctcancattgtttaaaaagggtcactcacagttttgtcaaanagtgctggtgttctntatgaactcataaactgttttatntgaaaaggtgattttntaagtagtgtaagccatgggtacatggtgcaaaaagttcatgt

SEQ ID NO: 722 - DNA, 576 bp, Homo sapiens
agctggatctcccacaaggtttccttgttaaaagggtgcttaagtaacctggccggcagcacgacttatgatgaagcacgaagaagccaggttctgtgtcgatcactctctcagtcccctcaactgctcatcttaaactatttggttcctgacacgtttccaaaaggggaaaggggaaaaggggaaggggggaaggggaacataaaaagtatttgttacatttaaaaagggggggaaggggaaagagctgtatctatgttcacctcattcaacttccttgagttatggcactatgatgttgcttaattaggtaagacatggatatttgcaccgagtgcaaatactgttcataacaaggtcatagctagaaagacagatgggctcaagtgtggacaaataatgtcatcaaggtaatagatcaaaaatattaaagccctataaaagatctgagcagtcaactccaaaacatccacatgacaaagtccttaaaatacaaatctcattactcttactcatgcaactgctaaaaaatagtgtgcagatatgtatttatatttgccttaaccttcaaaatct

SEQ ID NO: 723 - DNA, 623 bp, Homo sapiens
  misc_feature 102, 496: n = A,T,C or G
agggcgaattgggccctctagatgcatgctcgagcggccgcgtcgactgtggccttagctgtgctcgcgctactctctctttctggcctggaggctatccancgtactccaaagattcaggtttactcacgtcatccagcagagaatggaaagtcaaatttcctgaattgctatgtgtctgggtttcatccatccgacattgaagttgacttactgaagaatggagagagaattgaaaaagtggagcattcagacttgtctttcagcaaggactggtctttctatctcttgtactacactgaattcacccccactgaaaaagatgagtatgcctgccgtgtgaaccatgtgactttgtcacagcccaagatagttaagtgggatcgagacatgtaagcagcatcatggaggtttgaagatgccgcatttggattggatgaattccaaattctgcttgcttgctttttaatattgatatgcttatacacttacactntatgcacaaaatgtagggttataataatgttaacatggacatgatcttctttataattctactttgagtgctgtctccatgtttgatgtatctgagcaggttgctccacaggtagctctaggagggc

SEQ ID NO: 724 - DNA, 476 bp, Homo sapiens; identical to SEQ ID NO: 367
  misc_feature 214, 241: n = A,T,C or G

SEQ ID NO: 725 - DNA, 675 bp, Homo sapiens
  misc_feature 11: n = A,T,C or G
tgggccctctngatgcatgctcgagcggccgcgtcgaccaaaaatggaatggttgagttttctgtgacaagtaatgagaccatcacagtgtccccagaatatgttggctctcgactattgttgaagttaaaggaaatggcagaggcatatcttggaatgccagttgccaatgctgtcatttctgtaccagcagaatttgatctaaaacagagaaattcaacaattgaagctgctaaccttgcaggactgaagattttgagggtaataaatgaacccacagcagcagctatggcctatggtctccacaaggctgacgtcttccacgtcttggtgatagacttgggcggaggaactctagatgtgtctttactgaataaacaaggagggatgtttctaacccgagcaatgtctggaaacaataaacttggaggacaggacttcaatcagagattgcttcagtacttatataaacagatctatcaaacatatggcttcgtgccctctaggaaagaggaaatccacagattgagacaagctgtggaaatggtcaaattaaatctgactcttcatcaatctgctcagttgtcagtattactaacggtggaggagcaggacaggaaggaacctcacagtagtgacactgaactgccaaaagacaaactttcctcagcagat

SEQ ID NO: 726 - DNA, 376 bp, Homo sapiens
  misc_feature 25, 26, 152: n = A,T,C or G
atatttccatacaatcagaaacagnnaaaaaaatttggagagcacataaaaacatcttaaagttaaaaatataaagccttgtatttaaaaatgcagtcatttaaataatattataagaatctatttgtacataataaacaagtttcaaccancaagaaattactaatattgactgtggagttttggctgttttaatagttctaactcattattccgtaattcaacacagcactaccaacacagctggcaatgacaagactgggagtatcaaactaggattgttagttcaattaaaatttcagataaacaataatgtacttatactaaaaaattatttgttgtttatctgaaatgaaaatttaactgggtacccaat

SEQ ID NO: 727 - DNA, 649 bp, Homo sapiens
  misc_feature 24, 173, 234, 293, 361, 384, 460, 635: n = A,T,C or G
ctatagggcgaattgggccctctnatgcatgctcgagcggccgccctttttttttttttttttttttttttttactttgacaacaaattatattttaaatgtttcatatttacttttatatttccatacaatcagaaacagtaaaaaaaatttggagagcacataaaaacatnttaaagttaaaaatataaagccttgtatttaaaaatgcagtcatttaaataatattataanaatctatttgtacataataaacaagtttcaaccagcaagaaattactaatattgactgnggagttttggctgttttaatagttctaactcattattccgtaattcaacacagcactaccaacacagntggcaatgacaagactgggagtntcaaactaggattgttagttcaattaaaatttcagataaacaataatgtacttatactaaaaaattatttgttgtntatctgaaatgaaaatttaactgggtacccaattgtttgtttgtttaatctaaaaaccctgattgaaatttatctaataaaacatcatttaatatctaaaataaaataaatttactataacatctttataactattcaatcaatgattcatcttctatttttccaaattcttgcncaaatatttgatgc

SEQ ID NO: 728 - DNA, 74 bp, Homo sapiens
  misc_feature 13: n = A,T,C or G
gcatgctcgagcngccgcgacgcccgccgcagctggggcgatcccgggcagggcccggctcgcgtccagagtcg

SEQ ID NO: 729 - DNA, 627 bp, Homo sapiens
  misc_feature 30, 598, 599: n = A,T,C or G
actcactatagggcgaattgggccctctanatgcatgctcgagtggtattatgaggcctcaggtgccttggggtacattgtcatgctataagggatgtatatcataaggtatggtggaagaggggccttatgtgaatgattgccacatactgtttctgttgctgctttttttccgattcctttttgtcattggatttgtttgttttgtcatgtggtgaatggtgttttagttattgtgttgctgccagaatcagaatccagttcttgttcttactgccttatagttattgtgttgccaccagaatcagaatccagttcttgttcatactgccttgtagtgagggcagtttaatatctacaaagaagcttttagaagctgaaaaagtcaatgtgattgtgcattctgcttttaagaagctgtttcagctatgaactgtgtatgtgctataagtgtgaggtaccataagttatttaatttttaaaagaggaaactcctgagtgagctgtttaagaaatctgagtgtgatctattgttacgttatttataactaggtaaaatgtctgtcgtgatagatttcttttaacgttcagatactgnngttgggttgtctatatttaatatgcaga

SEQ ID NO: 730 - DNA, 631 bp, Homo sapiens
  misc_feature 49, 146, 221, 347, 372, 417, 432, 497, 522, 559, 566: n = A,T,C or G
ctttttttttttttttttaggttattaaataatttgtttattgtacggnatttacaaagaaaacagacaatgccctcagtagaaagaataaaaatgtatttagggctttatttttaactgacagcaaatagaaatcctttagtganatcgtggcaatttgacagtattataattaagctcaataaaggtacatggggtacctggaagatcaagatctacanctgcctatttccacatctttcaatccatctggctccttaaataggggaaaaagcccttatttggtggagaagcatttccaaaatgaagttacaggttctattaaaacttactgtcacatcaactgntaaaatagggccttttgtgttttgntatttcaccttaatatcaccagaattcctgtaattccacaattgngattttactatgtanaagataattcagttctagtctattgctttagatgtaaaaacagctgaaaacccaaagtggattanaattgctgaaggatttccctgccgntgtttgatacaatctattctcttgattcttgataggngcatagnaagcctaacttaaaattctttctacaggaacatgtctgatttcaggagtacccaatgaaggatcc

SEQ ID NO: 731 - DNA, 550 bp, Homo sapiens
  misc_feature 2, 32: n = A,T,C or G
cnactcactatagggcgaattgggccctctanatgcatgctcgagtgagttctcagaagaaactggggcttctggtacaaggaaagggaaacaaccacataaacgcaagaaaaaatccaggaaaaagtctctcaaaaaacctgctttattcttagaggcagaaagtaacacttcacattcagatgattcagcatccagcagttctgaggaaagtgaggaaagagacactaagaaaaccaaaaggaaaaagagagagaaaaaagcccatacctctgtagccaacaatgaaatacaggagaggacaaacaaacgcacaaattggaaagtagctacagatgaaaggtctgctgagagctcagaggatgactaaatgggaaacacttttgttttccacatgactgtggatatttacagttcttactccttgtggttttgccagtgactcttgttcagcacggggcctgaggtcagagctgtcttgtgccatctgtatgttctgacagacgtcttgtcttctattttggcgttaagcttgatccccttttcttgt

SEQ ID NO: 732 - DNA, 691 bp, Homo sapiens
  misc_feature 6, 11, 35, 553, 591, 616, 633, 635: n = A,T,C or G
tatacnactcntatagggcgaattgggccctctanatgcatgctcgagcggccgccctttttttttttttttttaggttattaaataatttgtttattgtacggcatttacaaagaaaacagacaatgccctcagtagaaagaataaaaatgtatttagggctttatttttaactgacagcaaatagaaatcctttagtgagatcgtggcaatttgacagtattataattaagctcaataaaggtacatggggtacctggaagatcaagatctacagctgcctatttccacatctttcaatccatctggctccttaaataggggaaaaagcccttatttggtggagaagcatttccaaaatgaagttacaggttctattaaaacttactgtcacatcaactgttaaaatagggccttttgtgttttgttatttcaccttaatatcaccagaattcctgtaattccacaattgtgattttactatgtagaagataattcagttctagtctattgctttagatgtaaaaacagctgaaaacccaaagtggattanaattgctgaaggatttccctgccgttgtttgatacaantctattctcttgattcttgataggngcatagaaagcctaacntnaaaattctttctacaggaacatgtctgatttcaggagtacccaatgaaggatccga

SEQ ID NO: 733 - DNA, 590 bp, Homo sapiens
  misc_feature 6, 509: n = A,T,C or G
gactcnctatagggcgaattgggccctctagatgcatgctcgagtctttaatataaccccaaatgaaagaaccaaggggaggggtgggatggcacttttttttgttggtcttgttttgttttgttttttggttggttggttcgttattttttaagattagccattctctgctgctatttccctacataatgtcaatttttaaccataattttgacatgattgagatgtacttgaggcttttttgttttaattgagaaaagactttgcaattttttttttaggatgagcctctcctagacttgacctagaatattacatattcctccagtaagtaatactgaagagcaaaagagaggcaggattggggtcacagccgcttcttcagcatggaccaagtgggccttggggattgcagcgttctcgaagtggctgtaggactcgaatttacagaaagccacagaggtgcaacttgaggctctgctagcaagccaccagtgaggctattgggnaaccacctttctatacaggagattggaatctactttgtcatttatccaccacagtgacaaaggaaaagtggtgccgttatg

SEQ ID NO: 734 - DNA, 223 bp, Homo sapiens
atgcatgctcgagataaaaccatcaagctatggaataccctgggtgtgtgcaaatacactgtccaggatgagagccactcagagtgggtgtcttgtgtccgcttctcgcccaacagcagcaaccctatcatcgtctcctgtggctgggacaagctggtcaaggtatggaacctggctaactgcaagctgaagaccaaccacattggccacacaggctatctga

SEQ ID NO: 735 - DNA, 620 bp, Homo sapiens
  misc_feature 34, 602: n = A,T,C or G
tacgactcactatagggcgaattgggccctctanatgcatgctcgagtggtattatgaggcctcaggtgccttggggtacattgtcatgctataagggatgtatatcataaggtatggtggaagaggggccttatgtgaatgattgccacatactgtttctgttgctgctttttttccgattcctttttgtcattggatttgtttgttttgtcatgtggtgaatggtgttttagttattgtgttgctgccagaatcagaatccagttcttgttcttactgccttatagttattgtgttgccaccagaatcagaatccagttcttgttcatactgccttgtagtgagggcagtttaatatctacaaagaagcttttagaagctgaaaaagtcaatgtgattgtgcattctgcttttaagaagctgtttcagctatgaactgtgtatgtgctataagtgtgaggtaccataagttatttaatttttaaaagaggaaactcctgagtgagctgtttaagaaatctgagtgtgatctattgttacgttatttataactaggtaaaatgtctgtcgtgatagatttcttttaacgttcagatactgnggttgggttgtctatatt

SEQ ID NO: 736 - DNA, 572 bp, Homo sapiens
  misc_feature 11: n = A,T,C or G
tgggccctctncatgcatgctcgagcggccgcgtcgacgtagagccgccgttggcttttacaccatccttgatgagaagccagtgatgaggagctgacttcacctgggagagccccagacagggcccctctatccttattattctatgccccaggtcatctgaccacctggaccttcccaccaaggtgaaaaaacctgagggatttttcacccaacacctgtagaaggttttgtttgtttgcttgtttaaattacagactttacagacagactttacagttctggaaccattgactcaaaagagtcccaggggctggaaatgaatcaattctgccttcacctgcctcttcttccttctcttcctcattttaagagaaaggctctttattggtggcagttcatataggtcagtgacccgggctcctagcctccctgtgtagtggactctgcctccagtgcttgagctgagagttttcacgtgagaagcagtggctggaagttgtactcctaggagctatgagcggcaggtaggcagagtcgtagattcatcctacaggtcagaaagcaggctg

SEQ ID NO: 737 - DNA, 646 bp, Homo sapiens
  misc_feature 515, 605: n = A,T,C or G
cgactcatatagggcgaattgggccctctacatgcatgctcgagcggccgccctttttttttttttttgtcacacttgtttatttctttgggatgttgctgtgtgtcatggaagaaacgctcccctgaaaactgtaaccaaacaaagtttggttaaaacaaagttggttcctttgttttcatggaaatgtcagacaactatgaaaagctaaggaagcatgttgaactgaaggtctggctttggtaaattaggcagagatgttctcagcagcaaacaggtaaaatctgacatcgagaagcattattttaatgtaggaccagttataatcttaaagaactgactaggttctaaaataatagaactgagaaataggactgagaaatgaccaacatcaagtataatacggtacacttagcacttgtttctatagaaaacatttcaaatcaagttctttatgatgtgaaccagattttccaaatgcctaaaccacttctgagctttaagcaaggcctcanaaattcagcgggtgcctgggaggcttcattcacattcacctctaaggagaggctaaaagaggaatttccagatggcagctactggctcanaaccagggggtcccttgccaagtctgtctctatgtggctcc

SEQ ID NO: 738 - DNA, 509 bp, Homo sapiens
  misc_feature 105, 109, 147, 305, 356, 372, 380, 387, 470: n = A,T,C or G
gcatgctcgagcggccgccctttttttttttttttgaaaaagtcatggaggccatggggttggcttgaaaccagctttggggggttcgattccttccttttttgnctanattttatgtatacgggttcttcgaatgtgtggtagggnggggggcatccatatagtcactccaggtttatggagggttcttctactattaggacttttcgctttgaagcgaaggcttctcaaatcatgaaaattattaatattactgctgttagagaaatgaatgagcctacagatgataggatgtttcatgtggngtatgcatcggggtagtccgagtaacgtcggggcattccggataggccganaaagtgttgtgggaanaaagttanatttacnccgatgaatatgatagtgaaatggattttggcgtaggtttggtctagggtgtagcctgagataggggaaatcagtgaatgaancctcctatgatggcaaatacagctcctattgataggaca

SEQ ID NO: 739 - DNA, 439 bp, Homo sapiens
  misc_feature 116, 283: n = A,T,C or G
tgggccctctacatgcatgctcgagcggccgcccttttttttttttttttggtgttggttctcttaatctttaacttaaaaggttaatgctaagttagctttacagtgggctctanagggggtagagggggtgctatagggtaaatacgggccctatttcaaagatttttaggggaattaattctaggacgatgggcatgaaactgtggtttgctccacagatttcagagcattgaccgtagtatacccccggtcgtgtagcggtgaaagtggtttggtttanacgtccgggaattgcatctgtttttaagcctaatgtggggacagctcatgagtgcaagacgtcttgtgatgtaattattatacgaatgggggcttcaatcgggagtactactcgattgtcaacgtcaaggagtcgcaggtcgcctggttctaggaa

SEQ ID NO: 740 - DNA, 667 bp, Homo sapiens
  misc_feature 332, 633, 635: n = A,T,C or G
ttgggccctctagatgcatgctcgagcggccgccctttttttttttttttttagaatatataatatgatcccatttatttaaaaaataaagattacatatttgcttatataccgcatacaaattttctgaaaattacataagaaattgttaatagattacctctggagaatagtactggggtaagaggtgagggggcagaattctcattttacagccttatatactgttgtgaatttttttttttaccatgtactttttaaaaatacaaaattgaggagggaacctcctactccaaaattacgaagcattcttttatgtacatttctctaanagttatatttgatatttttcaaggcaaactgacttgaggtactcgatgtttttaaatgtatttctaataattattagtagggtcacacctatttgacagcttttttaaaaagtcacatattgctgtatttttaaagatgacaaacctttatttaaatgagatgcttgctggagattttctttttcaaactcactttttaagttatggaaataatatcactgctgaaagtttggaaaacatatataagggtgccaaaaataccactaaaatcacataaaccaatcttaccattattaatggngngatttctttctttacatatctattaataccta

SEQ ID NO: 741 - DNA, 553 bp, Homo sapiens
gtcgacggcttcgtcttcggtttttctcttccttcgctaacgcctcccggctctcgtcagcctcccgccggccgtctccttaacaccgaacaccatgccttcaattaagttgcagagttctgatggagagatatttgaagttgatgtggaaattgccaaacaatctgtgactattaagaccatgttggaagatttgggaatggatgatgaaggagatgatgacccagttcctctaccaaatgtgaatgcagcaatattaaaaaaggtcattcagtggtgcacccaccacaaggatgaccctccccctcctgaagatgatgagaacaaagaaaagcgaacagatgatatccctgtttgggaccaagaattcctgaaagttgaccaaggaacactttttgaactcattctggctgcaaactacttagacatcaaaggtttgcttgatgttacatgcaagactgttgccaatatgatcaaggggaaaactcctgaggagattcgcaagaccttcaatatcaaaaatgactttactgaagaggaggaagcccaggta

SEQ ID NO: 742 - DNA, 576 bp, Homo sapiens
  misc_feature 492, 508: n = A,T,C or G
attgggccctctagatgcatgctcgagcaccgtcattaccccgagcacctgcagccccaggaagtcctggccgtcctcgctcaccaggagcccctcttggacccatgggtccaggagctccattttcgcctggaagaccattttcaccctttaatccaggagcacctgtttcacccttttctccatttcgtccatcgaagcctctgtgtcctttcataccagggaatccaggtatcccagctggacctttgatacctggaggtccaggcaatcctcgctctccaggtcgtccgggtctacctgattctccatcttttccagcaggaccagatggacctatagcaccaggaggtcctggagggcctgaaggaccagcttgcccaggttcaccagggggtccttggtatcctggagatccaggggaaccaggatgaccagatgtaccagggggaccgggagggcctggggggccagctggtccaggatagcctncgagtcctcctactgntactccagacttgacatcatatgaatcatactggggagaatagttctgaggaccagtagggcatgatt

SEQ ID NO: 743 - DNA, 117 bp, Homo sapiens
  misc_feature 12, 113, 117: n = A,T,C or G
tgggccctctanatgcatgctcgagcggccgcccttttttttttttttttttttttttttttttttttttttttttttttttttttttttttttttttttttttttttttttnaaan

SEQ ID NO: 744 - DNA, 672 bp, Homo sapiens
  misc_feature 3, 400, 470, 550, 575, 612: n = A,T,C or G
acnactcatatagggcgaattgggccctctagatgcatgctcgagcggccgccctttttttttttttttttaggttattaaataatttgtttattgtacggcatttacaaagaaaacagacaatgccctcagtagaaagaataaaaatgtatttagggctttatttttaactgacagcaaatagaaatcctttagtgagatcgtggcaatttgacagtattataattaagctcaataaaggtacatggggtacctggaagatcaagatctacagctgcctatttccacatctttcaatccatctggctccttaaataggggaaaaagcccttatttggtggagaagcatttccaaaatgaagttacaggttctattaaaacttactgtcacatcaactgntaaaatagggccttttgtgttttgttatttcaccttaatatcaccagaattcctgtaattccacaattgngattttactatgtagaagataattcagttctagtctattgctttagatgtaaaaacagctgaaaacccaaagtggattanaattgctgaaggatttccctgccgntgtttgatacaatctattctcttgattcttgataggngcatagaaagcctaacttaaaattctttctacaggaacatgtctgatttcaggagtaccc

SEQ ID NO: 745 - DNA, 309 bp, Homo sapiens
  misc_feature 228, 233: n = A,T,C or G
ctttttttttttttttaagatatatctgtatttctttgtcgttgtttaaaaataaatatgtactacggaatatctcgaaaaactgcactagagacaaagacgtgatgttaatatcttttccccacaattattacggataaacagtagcaccaataaataaatgataacaaatattaaaattaaaaaaggagagagatttagtatgtagaattctctattttttcttgntttgnttttacatataaaaaacagaatagcaatgtctattttatcagaatcacatatatacataaacatatatatatatat

SEQ ID NO: 746 - DNA, 665 bp, Homo sapiens
tatacgactcactatagggcgaattgggccctctagatgcatgctcgaggcctaggaggagaggtgggctctggcagcgggtgtgaggtggcagtgagaagccaggccctcaggtgcagctcaggcctctgccgctggggcctcatagttgagcacgtagtagtcgtggacgtacatgaggacggctattggctgtccgatgatgagcgacagccacacagctgcgttgccatagttgccctggaaaaagcggcccacgaaccaggccagtgggatctgagccatcatgcccgtgaacgcccagaggcggaacattcgcagagggacgctcaccaggtactcgtggaagaaggccgaggccaggaacacccctgtcctggccatccacttgctgctgccccgtcgaagcatgggcttgtagaagtgtctgatgcaccacttgtgcacagggatgttccagttctgccagaagtaggtgacagactcggagttccaccagtcccggtagaactcccggtctccaaactgcatgagctcagccacggcattcaggcaggagtggaagagccagtagaagaagatgagccagatgaggtgattggggaccgccagcttcaggaggcgctcgatgatgcgtgagtagtccatgtccttgaagggcttca

SEQ ID NO: 747 - DNA, 677 bp, Homo sapiens
  misc_feature 434, 435: n = A,T,C or G
gactcactatagggcgaattgggccctctacatgcatgctcgagtatactgggacccaccgttggtgaaagattctgctgatggtaccatcaccagggtgacacttcggggccctgagcctggctctcactttcccgaaggagagcatgtgattcgttacactgcctatgaccgagcctacaaccgggccagctgcaagttcattgtgaaagtacaagtgagacgctgcccaactctgaaacctccgcagcacggctacctcacctgcacctcagcgggggacaactatggtgccacctgtgaataccactgtgatggcggttatgatcgccaggggacaccctcccgggtctgtcagtccagccgccagtggtcaggttcaccaccaatctgtgctcctatgaagattaacgtcaacgtcaactcagctgctnngtctcttggatcaattctatgagaaacagcgactcctcatcatctcagctcctgatccttccaaccgatattataaaatgcagatctctatgctacagcaatccacctgtggactggatttgcggcatgtgaccatcattgaactggtgggacagccacctcaggaggtggggcgcatccgggagcaacagctgtcagccaacatcatcgaggagctcaggcaatttcagcgcctcactcgc

SEQ ID NO: 748 - DNA, 635 bp, Homo sapiens
  misc_feature 5, 33, 34: n = A,T,C or G
tatcnactcactatagggcgattgggccctctnnatgcatgctcgagcggccgccctttttttttttttttactttgacaacaaattatattttaaatgtttcatatttacttttatatttccatacaatcagaaacagtaaaaaaaatttggagagcacataaaaacatcttaaagttaaaaatataaagccttgtatttaaaaatgcagtcatttaaataatattataagaatctatttgtacataataaacaagtttcaaccagcaagaaattactaatattgactgtggagttttggctgttttaatagttctaactcattattccgtaattcaacacagcactaccaacacagctggcaatgacaagactgggagtatcaaactaggattgttagttcaattaaaatttcagataaacaataatgtacttatactaaaaaattatttgttgtttatctgaaatgaaaatttaactgggtacccaattgtttgtttgtttaatctaaaaaccctgattgaaatttatctaataaaacatcatttaatatctaaaataaaataaatttactataacatctttataactattcaatcaatgattcatcttctatttttccaaattcttgcaca

SEQ ID NO: 749 - DNA, 610 bp, Homo sapiens
  misc_feature 31, 32, 179, 196, 198, 204, 254, 313, 333, 336, 338, 389,391, 407, 413, 415, 457, 521, 556: n = A,T,C or G
cgactcactatagggcgaattgggccctctnnatgcatgctcgagcggccgcccttttttttttttttttttttttgagatcagaattaaattctttaatacaaaatgcttttttttttttaagatatatctgtatttctttgtcgttgtttaaaaataaatatgtactacggaatatntcgaaaaactgcactananacaaanacgtgatgttaatatcttttccccacaattattacggataaacagtagcnccaataaataaatgataacaaatattaaaattaaaaaaggagagagatttagtatgtanaattctctattttttcttgnttngnttttacatataaaaaacagaatagcaatgtctattttatcagaatcacatntntacataaacatatatntatatntntacacacaaatacaagttgccaaatatatatatagtatgtanatgtatattgaaaccttatttcaaaggaatgtgtgctggggagccaggggatcggggagggcanagctgagtgttagcaaaattaaatatctgttcaanataagctagtgactgtcaccgatcagggagagagagattggaaacatgaatttt

SEQ ID NO: 750 - DNA, 555 bp, Homo sapiens
  misc_feature 32, 297, 308, 457, 483, 503: n = A,T,C or G
gactcactatagggcgaattgggccctctagntgcatgctcgagtctttaatataaccccaaatgaaagaaccaaggggaggggtgggatggcacttttttttgttggtcttgttttgttttgttttttggttggttggttcgttattttttaagattagccattctctgctgctatttccctacataatgtcaatttttaaccataattttgacatgattgagatgtacttgaggcttttttgttttaattgagaaaagactttgcaattttttttttaggatgagcctctcctanacttgacctanaatattacatattcctccagtaagtaatactgaagagcaaaagagaggcaggattggggtcacagccgcttcttcagcatggaccaagtgggccttggggattgcagcgttctcgaagtggctgtaggactcgaatttacagaaagccncagaggtgcaacttgaggctctgctngcaagccaccagtgaggctnttgggtaaccacctttctatacaggagattggaatctactttgtcatttatc

SEQ ID NO: 751 - DNA, 511 bp, Homo sapiens
tgggccctctagatgcatgctcgagcggccgccctttttttttttttttttttagtaaatatatgttttatttgtcaagagtaaatgtcagttttatttagaatattcaagtacaaaaaatgaaaatgtatatatctatgactgttaagaaatgttagaaatcattaaaatgttctgagaataccagtaaggcactgaatgcaaataccacctgaaatatgaattatgtgcatttttatatctttaatattcagatgttcatagttattttcttaaaaagtatttttaataaaatgattcaaccttattatttttaccctggaagacagagtttaaacaagtatgtaatgaaaagttttcctaatgaaagctgtgatacactcatgctcaaaggtactttatccttaggaaaaaacatccagatatataagctattttgtttcaccacagtaatacgtcagccataatatgatgacttcatgctttattatgccttattgtcgacgcggcc

SEQ ID NO: 752 - DNA, 661 bp, Homo sapiens
  misc_feature 30: n = A,T,C or G
actcactatagggcgaattgggccctctanatgcatgctcgagaggacaaaaacccacaccggacatagatcacaaaacttcctagaactctcctttaaatcggaagaaatttgtaaaatgtgatatgaaatacaactctacaaacatccaaaatacatttctggtcataattaatcgtatttgacattttcctctaagtttaatgcaactttaaataatttaggctttttcctaacatgatagatttttttcagtatcagaaatggacaagaggaaactccagtaaagagaaaagcaatgaatttaaaagggtgcagaatctgaaaacaaactaaccacaatgtacatttaattgtacttaattgtatatttcatttaaatagtccttctcaggggtttaataatttagaatcaatagttcccttcaaaacataataaaatatttacactttataaaatattaaccgattaacaatacagccgtgttgtttataagagtgtaactgaagtcctgcaaatcatgctgttgacacaagcctgtgaggttagcgaagtgatccttagcaaaatgtaaatgaagatcttcagacagtggtgtttataaaatagctcattaatgacttaggattgaatcgctccaaccattcgcatcatcagata

SEQ ID NO: 753 - DNA, 594 bp, Homo sapiens
ctatagggcgaattgggccctctagatgcatgctcgagcaccgtcattaccccgagcacctgcagccccaggaagtcctggccgtcctcgctcaccaggagcccctcttggacccatgggtccaggagctccattttcgcctggaagaccattttcaccctttaatccaggagcacctgtttcacccttttctccatttcgtccatcgaagcctctgtgtcctttcataccagggaatccaggtatcccagctggacctttgatacctggaggtccaggcaatcctcgctctccaggtcgtccgggtctacctgattctccatcttttccagcaggaccagatggacctatagcaccaggaggtcctggagggcctgaaggaccagcttgcccaggttcaccagggggtccttggtatcctggagatccaggggaaccaggatgaccagatgtaccagggggaccgggagggcctggggggccagctggtccaggatagcctgcgagtcctcctactgctactccagacttgacatcatatgaatcatactggggagaatagttctgaggaccagtagggcatgattcacagat

SEQ ID NO: 754 - DNA, 81 bp, Homo sapiens
  misc_feature 7: n = A,T,C or G
tctagcngcatgctcgagcggccgccctttttttttttttttttttttttttttttttttttttttttttttttttttttt

SEQ ID NO: 755 - DNA, 608 bp, Homo sapiens
  misc_feature 1: n = A,T,C or G
nctataggggcgaattgggccctctagatgcatgctcgagcaccgtcattaccccgagcacctgcagccccaggaagtcctggccgtcctcgctcaccaggagcccctcttggacccatgggtccaggagctccattttcgcctggaagaccattttcaccctttaatccaggagcacctgtttcacccttttctccatttcgtccatcgaagcctctgtgtcctttcataccagggaatccaggtatcccagctggacctttgatacctggaggtccaggcaatcctcgctctccaggtcgtccgggtctacctgattctccatcttttccagcaggaccagatggacctatagcaccaggaggtcctggagggcctgaaggaccagcttgcccaggttcaccagggggtccttggtatcctggagatccaggggaaccaggatgaccagatgtaccagggggaccgggagggcctggggggccagctggtccaggatagcctgcgagtcctcctactgctactccagacttgacatcatatgaatcatactggggagaatagttctgaggaccagtagggcatgattcacagattccaggggggcc

SEQ ID NO: 756 - DNA, 525 bp, Homo sapiens
gccaactcacacaaggcaggtgagtgaggaaatccagagttgccatggagaaaaatccagtgtcagcattcttgctccttgtggccctctcctacactctggccagagataccacagtcaaacctggagccaaaaaggacacaaaggactctcgacccaaactgccccagaccctctccagaggttggggtgaccaactcatctggactcagacatatgaagaagctctatataaatccaagacaagcaacaaacccttgatgattattcatcacttggatgagtgcccacacagtcaagctttaaagaaagtgtttgctgaaaataaagaaatccagaaattggcagagcagtttgtcctcctcaatctggtttatgaaacaactgacaaacacctttctcctgatggccagtatgtccccaggattatgtttgttgacccatctctgacagttagagccgatatcactggaagatattcaaaccgtctctatgcttacgaacctgcagatacagctctgttgc

SEQ ID NO: 757 - DNA, 556 bp, Homo sapiens
  misc_feature 47, 190, 335, 341, 407, 462, 483, 526: n = A,T,C or G
gcatgctcgagcggccgcccttttttttttttttttttttttttganacggagtctcgctctgtcgcccaggccggactgcggactgcagtggcgcaatctcggctcactgcaagctccgcttcccgggttcacgccattctcctgcctcagcctcccgagtagctgggactacaggcgcccgccaccgngcccggctaatattttgtatttttagtagagacggggtttcaccttgttagccaggatggtctcgatctcctgacctcatgatccacccgcctcggcctcccaaagtgctgggattacaggcgtgagccaccgcgcccggccggngacacncttttaagtacgaacagacaaccaacgattatgagaaatctgagagaagctactattgtaaaaganatcgaaaatatcgaaaaaagctaactagaataacctaagattatgcagggattanaaaatgccaaaaaacccttanaccccaactattatttacatcctcagataagttacagcaactntgaaataaaagaacgggatactaaaggaag

SEQ ID NO: 758 - DNA, 408 bp, Homo sapiens
  misc_feature 20, 21, 109, 133, 163, 164, 211, 236, 250, 282, 314, 334,400: n = A,T,C or G
gcatgctcgagcggccgcgnngacgtggagacaacaacccagacaagatcccactgtctctttccccagcgtcggtagtcccgtggcatgcgggggcatcagcagccantgcggggctctgggcctgagtttncagcagctggaggggcgtgagctttggccnntctctgagctcccagggagaagtaactagggtggtctctgagatttnctaacgctgtgtctgggactctganctcggatgtcacanatagaagtcaggggatctgtgaggctggatangaggaaattactaattttcactaacctttcancaaagcgtaccatttccttncattatgaacatcagcaacaaacatctgtcatcagaagtcacaggtgttcccatgtcctgccgcangggtcacg

SEQ ID NO: 759 - DNA, 596 bp, Homo sapiens
  misc_feature 37: n = A,T,C or G
gtatacgactcactatagggcgaattgggccctctanatgcatgctcgagaagtaattatcagttggtttggatttttggaccaccgttcagtcattttgggttgccgtgctcccaaaacattttaaatgaaagtattggcattcaaaaagacagcagacaaaatgaaagaaaatgagagcagaaagtaagcatttccagcctatctaatttctttagttttctatttgcctccagtgcagtccatttcctaatgtataccagcctactgtactatttaaaatgctcaatttcagcaccgatggccatgtaaataagatgatttaatgttgattttaatcctgtatataaaataaaaagtcacaatgagtttgggcatatttaatgatgattatggagccttagaggtctttaatcattggttcggctgcttttatgtagtttaggctggaaatggtttcacttgctctttgactgtcagcaagactgaagatggcttttcctggacagctagaaaacacaaaatcttgtaggtcattgcacctatctcagccataggtgcagtttgcttctacatgatgctaaaggctgcgaatg

SEQ ID NO: 760 - DNA, 123 bp, Homo sapiens
  misc_feature 20, 110, 114, 116: n = A,T,C or G
agggcgattgggccctctanatgcatgctcgagcggccgccctttttttttttttttttttttttttttttttttttttttttttttttttttttttttttttttttttnggcncnaaaaggg

SEQ ID NO: 761 - DNA, 116 bp, Homo sapiens
gggcgaatgggccctctagatgcatgctcgagcggccgcccttttttttttttttttttttttttttttttttttttttttttttttttttttttttttttttttttttttaaaag

SEQ ID NO: 762 - DNA, 232 bp, Homo sapiens
  misc_feature 30: n = A,T,C or G
actcactatagggcgaattgggccctctanatgcatgctcgagaggcggagaggatcatgtccgggaactgcggggtagtagcgatctgggttacccagccgttgtggcccttgagggtgccacgaagggtcatctgctcagtcatggcggcggcgagagcgtgtgtcgctgcagcgacgaggatggcactggatggcttagagaaactagcaccacaacctctcctgccgc

SEQ ID NO: 763 - DNA, 639 bp, Homo sapiens
  misc_feature 36, 403, 456, 495, 626: n = A,T,C or G
tatacgactcactatagggcgaattgggccctctanatgcatgctcgagaagtaattatcagttggtttggatttttggaccaccgttcagtcattttgggttgccgtgctcccaaaacattttaaatgaaagtattggcattcaaaaagacagcagacaaaatgaaagaaaatgagagcagaaagtaagcatttccagcctatctaatttctttagttttctatttgcctccagtgcagtccatttcctaatgtataccagcctactgtactatttaaaatgctcaatttcagcaccgatggccatgtaaataagatgatttaatgttgattttaatcctgtatataaaataaaaagtcacaatgagtttgggcatatttaatgatgattatggagccttanaggtctttaatcattggttcggctgcttttatgtagtttaggctggaaatggnttcacttgctctttgactgtcagcaagactgaagatggnttttcctggacagctagaaaacacaaaatcttgtaggtcattgcacctatctcagccataggtgcagtttgcttctacatgatgctaaaggctgcgaatgggatccgagctcggtaccaagcttggcgtancatgggcatagct

SEQ ID NO: 764 - DNA, 608 bp, Homo sapiens
  misc_feature 552, 569: n = A,T,C or G
cttttttttttttttttttagttatagagctaattggcttttatttgtgatttatgaattaaagcagcaccactctacaagtacagtgatagctccccctgggcaatacaatacaagaacagtgggttttgtcaaattggaacaaggaaacagaaccacagaaataaatacattggttaacatcagattagttcaggttacttttttgtaaaagttaaagtagaggggacttctgtattatgctaactcaagtagactggaatctcctgtgttctttttttttttaaattggttttaattttttttaattggatctatcttcttccttaacatttcagttggagtatgtagcatttagcaccactggctcaatgcgctcacctaggtgagagtgtgaccaaatcttaaagcattagtgctattatcagttaccaccatttggggcttttatccttcatgggttatgatgttctcctgatgacacatttctctgagttttgtaattccagccaaagagagaccattcactatttgatggctggctgcatgcanacatttaaagcttttanagaatacactacaccagggagtatgactactagtatgac

SEQ ID NO: 765 - DNA, 61 bp, Homo sapiens
tagggcgaattgggccctctagatgcatgctcgagcggccgccctttttttttttttttgc

SEQ ID NO: 766 - DNA, 627 bp, Homo sapiens
ctatagggcgaattgggccctctagatgcatgctcgagacaaccataaagacttgactaggaaatcaaaaggtttttattaaacaagacttcctctgaggctattcgagcaagcagatttggctataagtcagatacgcaagatttctgaaccatgtataaatacgttctgcagaatttcgaagtgtgcgtcctttgacttttccagggatgcaccaggggccaacccgttatgtagacacggttactgttttaggactgggtgacatggggcctgggtaaaaaaataaggccaaaactgagtaagctcaatttatagagcaatatcagtgctggacagatctgccatgcttcgtttacatcatgtttcctacttttgatttcttcatcttatttatagtcttcctcccatcccctgaacacaaacttgactttatcttctaactaagatctttccactcaagggggcgtaggaaaacaattcctggatgcctttctaactaaaaccagcaggactaagtgctcaagattttataatatttcgatttagaggtttctagagttattcctgagacgtgccatagcagtaaatgaattggtgaattgagtagaaggtagttgtgacatc

SEQ ID NO: 767 - DNA, 565 bp, Homo sapiens
  misc_feature 35, 36: n = A,T,C or G
tatacgactcactatagggcgaattgggccctctnnatgcatgctcgagcagttaccaaggaccactttactgcgatcaggattccaacgaccacctaatttcgtatctttcaactcttttcgaccggacctcttattcggaagcgttacaggaagacaggtctcaacttagggatcagatcacgttatcaacgctctgggatcgctgcaacctggcacttcaaggaagtgcaccgataacgtctagaccggcaaacacagatctagaggtggccaactgatcactgtaggagctgactggcaaagtcaaccaggcccaaccaagagtgaccaagacaacgattaggataacccacaggcactcctcgtcataaggccaacgacacagacaggctggcaaataaagggtttaatatttggttaaaaattgattttaaaaaacaagaaaaatatcctcaaaacatttacatttgatcactaatattaaagttcaaaatatcccccaaattacatttaattaaatgtttaaaattacaattccattaaatccattgtcgacgcggcc

SEQ ID NO: 768 - DNA, 72 bp, Homo sapiens
  misc_feature 25, 64, 72: n = A,T,C or G
ctatagggcgaattgggccctctanatgcatgctcgagcggccgcccttttttttttttttttntttttttn

SEQ ID NO: 769 - DNA, 223 bp, Homo sapiens; identical to SEQ ID NO: 734

SEQ ID NO: 770 - DNA, 639 bp, Homo sapiens
  misc_feature 36: n = A,T,C or G
tatacgactcactatagggcgaattgggccctctanatgcatgctcgagtcggccagctggatctcccacaaggtttccttgttaaaagggtgcttaagtaacctggccggcagcacgacttatgatgaagcacgaagaagccaggttctgtgtcgatcactctctcagtcccctcaactgctcatcttaaactatttggttcctgacacgtttccaaaaggggaaaggggaaaaggggaaggggggaaggggaacataaaaagtatttgttacatttaaaaagggggggaaggggaaagagctgtatctatgttcacctcattcaacttccttgagttatggcactatgatgttgcttaattaggtaagacatggatatttgcaccgagtgcaaatactgttcataacaaggtcatagctagaaagacagatgggctcaagtgtggacaaataatgtcatcaaggtaatagatcaaaaatattaaagccctataaaagatctgagcagtcaactccaaaacatccacatgacaaagtccttaaaatacaaatctcattactcttactcatgcaactgctaaaaaatagtgtgcagatatgtatttatatttgccttaaccttcaaatctagggacata

SEQ ID NO: 771 - DNA, 510 bp, Homo sapiens
  misc_feature 12, 248, 275, 377: n = A,T,C or G
tgggccctctanatgcatgctcgagcggccgccctttttttttttttttttgcagttatttttaaaactttattttaaaaatatgagcatctattttaaaagttttgataattattgccattattttcttgtgattggtacaatttaaaaataagtctatgttttcacattgattttaaaaaatatagcatgtttgaattacaaatgattaagcaaactctattacttcatagctgaccatcttccanaaaattcccacttaattgaatacttanaaaaaaatggccagtggccgattgaaaggtatattaaaattaagggcagttttaattctgaagacaaatatcttcatggaaatctatttgtaagcttctganattgctgctgaaagtctacagtctgtgaatataccaattcccctttacaactgatgcagatcattatgaaatactggaaggcataccctacaatttaggaattggtgtggctgccactgctatgctctcaatt

SEQ ID NO: 772 - DNA, 541 bp, Homo sapiens
  misc_feature 12, 382, 417, 420, 427, 428, 434, 437, 442, 451, 455, 465,479, 481, 494: n = A,T,C or G
tgggccctctanatgcatgctcgagcggccgccctttttttttttttttttatttttaagcttttattttatcactcttatcaaacacacatcagaaagcattatcaacagtgcatcttatggtaagtcagtttacaacaaaactgaacaaggcaattgtgtttacagaaaaagtcttcagcaaaaaagtatgcaatacagtcaactgaaacgcattgttcacactttttaggaatataggaaagtggaaaataaaagttctttgctattcagcaggaaagagtttaaaagacttgaatggaaatcagaaatttagggatttgagaaaataactttttggtactgacacacatctacatacatagtcccacttagtttttgntttttctttaaaaaaaaaacaaaagctcacaaacnatnagacatnncaaatnatncagcngaacccagngccnagaaatgccnagaccaatatgctncntgaaacaactggnagaaatgtcacagacaactattcactatgtattggaatattcttgga

SEQ ID NO: 773 - DNA, 650 bp, Homo sapiens
  misc_feature 9, 553, 562, 587, 590: n = A,T,C or G
gccctctanatgcatgctcgagcggccgcccttttttttttttttttggttattaaataatttgtttattgtacggcatttacaaagaaaacagacaatgccctcagtagaaagaataaaaatgtatttagggctttatttttaactgacagcaaatagaaatcctttagtgagatcgtggcaatttgacagtattataattaagctcaataaaggtacatggggtacctggaagatcaagatctacagctgcctatttccacatctttcaatccatctggctccttaaataggggaaaaagcccttatttggtggagaagcatttccaaaatgaagttacaggttctattaaaacttactgtcacatcaactgttaaaatagggccttttgtgttttgttatttcaccttaatatcaccagaattcctgtaattccacaattgtgattttactatgtagaagataattcagttctagtctattgctttagatgtaaaaacagctgaaaacccaaagtggattagaattgctgaaggatttccctgccgttgnttgatacantctattctcttgattcttgataggngcntagaaagcctaacttaaaattcttttctacaggaacatgtctgatttcaggagtacccaa

SEQ ID NO: 774 - DNA, 580 bp, Homo sapiens
  misc_feature 236, 402, 568: n = A,T,C or G
ctttttttttttttttactttgacaacaaattatattttaaatgtttcatatttacttttatatttccatacaatcagaaacagtaaaaaaaatttggagagcacataaaaacatcttaaagttaaaaatataaagccttgtatttaaaaatgcagtcatttaaataatattataagaatctatttgtacataataaacaagtttcaaccagcaagaaattactaatattgactgnggagttttggctgttttaatagttctaactcattattccgtaattcaacacagcactaccaacacagctggcaatgacaagactgggagtatcaaactaggattgttagttcaattaaaatttcagataaacaataatgtacttatactaaaaaattatttgttgnttatctgaaatgaaaatttaactgggtacccaattgtttgtttgtttaatctaaaaaccctgattgaaatttatctaataaaacatcatttaatatctaaaataaaataaatttactataacatctttataactattcaatcaatgattcatcttctatttttccnaattcttgcaca

SEQ ID NO: 775 - DNA, 449 bp, Homo sapiens
  misc_feature 90, 111, 120, 127, 173, 182, 264, 332, 334, 346, 350, 359,369, 407, 414, 440, 442, 445: n = A,T,C or G
tgggccctctagatgcatgctcgagcggccgcccttttttttttttttttttttttttactttgacaacaaattatattttaaatgtttnatatttacttttatatttccntacaatcanaaacagnaaaaaaaatttggagagcacataaaaacatcttaaagttaaaaatntaaagcctngtatttaaaaatgcagtcatttaaataatattataagaatctatttgtacataataaacaagtttcaaccagcaagaaattnctaatattgactgtggagttttggctgttttaatagttctaactcattattccgtaattcaacacagnantaccaacacagntggnaatgacaanactgggagtntcaaactaggattgttagttcaattaaaatttcagatnaacaatnatgtacttatactaaaaaattatttngntgnttat

SEQ ID NO: 776 - DNA, 57 bp, Homo sapiens
tgggccctctagatgcatgctcgagcggccgccctttttttttttttttaagacata

SEQ ID NO: 777 - DNA, 406 bp, Homo sapiens
  misc_feature 12: n = A,T,C or G
tgggccctctanatgcatgctcgagctatgcaacctctgttcttgtatttcttatgatctctgatgggttcttctcgaaaatgccaagtggaagactttgtggcatgctccagatttaaatccagctgaggctccctttgttttcagttccatgtaacaatctggaaggaaacttcacggacaggaagactgctggagaagagaagcgtgttagcccatttgaggtctggggaatcatgtaaagggtacccagacctcacttttagttatttacatcaatgagttctttcagggaaccaaacccagaattcggtgcaaaagccaaacatcttggtgggatttgataaatgccttgggacctggagtgctgggcttgtgcacaggaagagcaccagccgctgagtca

SEQ ID NO: 778 - DNA, 604 bp, Homo sapiens
  misc_feature 31, 134, 191, 460, 471: n = A,T,C or G
gactcactatagggcgaattgggccctctanatgcatgctcgagcggccgccctttttttttttttttttttttactggtaacacctttttaataggtcaaagtaactgtacagttcattatattcttcctganaataatttatatcccccaacaaactaaagggagggtatattttttcaaaattaacanaatggatggtgtaactggacatcaaaagaaaaccaaattcctgttttgcttcattctctcctgggaagacagatacaaggaagggttagttaactccagtggctgtaaaatagtcaacatggctttaatctttctttataaattatataaaaatggaaaaaggggatggttctggaacttctcctcaatgcagtttggaggtgctctggtacaaagcatttctgcttccaagagaaataacattgctacaaaaaactggcacattattntgtgaaaaaanacatgagtttttagttgtgttctacagctagttcccgacccaatgcttcacatatccacacgaaagtaaaaggcaggtaagacaaaaagggctgtagttttttctgaaataactcaagtcttcaaaatatagc

SEQ ID NO: 779 - DNA, 133 bp, Homo sapiens
gactcactatagggcgattgggccctctagcatgcatgctcgagcggccgcccttttttttttttttttttttttttttttttttttttttttttttttttttttttttttttttttttttttttttttttaa

SEQ ID NO: 780 - DNA, 624 bp, Homo sapiens
  misc_feature 12, 330, 596: n = A,T,C or G
tgggccctctanatgcatgctcgagcggccgccctttttttttttttttttagaatatataatatgatcccatttatttaaaaaataaagattacatatttgcttatatacgcatacaaattttctgaaaattacataagaaattgttaatagattacctctggagaatagtactggggtaagaggtgagggggcagaattctcattttacagccttatatactgttgtgaatttttttttttaccatgtactttttaaaaatacaaaattgaggagggaacctcctactccaaaattacgaagcattcttttatgtacatttctctaanagttatatttgatatttttcaaggcaaactgacttgaggtactcgatgtttttaaatgtatttctaataattattagtagggtcacacctatttgacagcttttttaaaaagtcacatattgctgtatttttaaagatgacaaacctttatttaaatgagatgcttgctggagattttctttttcaaactcactttttaagttatggaaataatatcactgctgaaagtttggaaaacatatataagggtgccaaaaataccactnaaaatcacataaaccaatcttaccatta

SEQ ID NO: 781 - DNA, 575 bp, Homo sapiens
  misc_feature 99, 572: n = A,T,C or G
cttttttttttttttttttttttttaaataatattataagaatctatttgtacataataaacaagtttcaaccagcaagaaattactaatattgactgnggagttttggctgttttaatagttctaactcattattccgtaattcaacacagcactaccaacacagctggcaatgacaagactgggagtatcaaactaggattgttagttcaattaaaatttcagataaacaataatgtacttatactaaaaaattatttgttgtttatctgaaatgaaaatttaactgggtacccaattgtttgtttgtttaatctaaaaaccctgattgaaatttatctaataaaacatcatttaatatctaaaataaaataaatttactataacatctttataactattcaatcaatgattcatcttctatttttccaaattcttgcacaaatatttgatgcttaaataaatacataaataataaataggttaataagttacacttgaaaataatttatgttatgatgaaaaaacttaaagtgcttccacatgtcctcacaacatcactgtgaggtaanatg

SEQ ID NO: 782 - DNA, 604 bp, Homo sapiens
  misc_feature 343, 363, 377, 400, 403, 440, 444, 448, 579: n = A,T,C or G
cttttttttttttttttactttgacaacaaattatattttaaatgtttcatatttacttttatatttccatacaatcagaaacagtaaaaaaaatttggagagcacataaaaacatcttaaagttaaaaatataaagccttgtatttaaaaatgcagtcatttaaataatattataagaatctatttgtacataataaacaagtttcaaccagcaagaaattactaatattgactgtggagttttggctgttttaatagttctaactcattattccgtaattcaacacagcactaccaacacagctggcaatgacaagactgggagtatcaaactaggattgntagttcaattaaaatttcanataaacaataatgnacttatactaaaaaattatttgntgnatatctgaaatgaaaatttaactgggtacccaattgnttgnttgnttaatctaaaaaccctgattgaaatttatctaataaaacatcatttaatatctaaaataaaataaatttactataacatctttataactattcaatcaatgattcatcttctatttttccaaattcttgcncaaatatttgatgcttaaataaata

SEQ ID NO: 783 - DNA, 616 bp, Homo sapiens
  misc_feature 29, 542, 604: n = A,T,C or G
ctcactatagggcgaattgggccctctanatgcatgctcgagcggccgccctttttttttttttttttattaaataatttgtttattgtacggcatttacaaagaaaacagacaatgccctcagtagaaagaataaaaatgtatttagggctttatttttaactgacagcaaatagaaatcctttagtgagatcgtggcaatttgacagtattataattaagctcaataaaggtacatggggtacctggaagatcaagatctacagctgcctatttccacatctttcaatccatctggctccttaaataggggaaaaagcccttatttggtggagaagcatttccaaaatgaagttacaggttctattaaaacttactgtcacatcaactgttaaaatagggccttttgtgttttgttatttcaccttaatatcaccagaattcctgtaattccacaattgtgattttactatgtagaagataattcagttctagtctattgctttagatgtaaaaacagctgaaaacccaaagtggattanaattgctgaaggatttccctgccgttgtttgatacaatctattctcttgattcttgataggngcatagaaagcc

SEQ ID NO: 784 - DNA, 388 bp, Homo sapiens
  misc_feature 175: n = A,T,C or G
cactatagggcgaattgggccctctagatgcatgctcgagcggccgccctttttttttttttttttccttgggaaacagctttatttacaaaacaggtctaaaataagaacatgaaatgacaagtccttgggaactgcgggagaggtggttcttgtgtgaagcccaggcatccanacgtagggccaaaaaaagggctagtgtgaggggacctaaaacttgaactccttatatttcttgctgcccccacggctgtcctggggctgagctttccgttttttttgcttctgtttggcagcgtgctcagccaccatgtcactgaagtcctccttctctacttgagcctgctgctcccgcacatgctcctcatacttctgggtcatggccata

SEQ ID NO: 785 - DNA, 552 bp, Homo sapiens
  misc_feature 3, 481, 550: n = A,T,C or G
acnactcactatagggcgaattgggccctctagatgcatgctcgaggggtgtgtggctactttaatgaaaggctttcctgctctaaatctctttgctgggctgggcctcttcagactatctggtgaaactcctttccttagaacaaactcagtccgtccatgctctgtggcattttgctagatgataaccaaagccttattcctgtagccagtgtcagcagtcagagaggtggagggtgtgttctgctgtggttatgcatacctatctgctgttcttgaggtgtaaaaggaaaggtgaaaatcgggccaggccaagtactcagctgtcttaataggatgaagccttaagcagtggaaatttcagttattttccacagtattccattttggaggatttggggtgtttactttttaaattcttgaacaacttaacctccatgaggctttgtgaagtcagctgtgaccaccctcctcttactgngttctcagtattcattcacttccagggaagaatgacagccacagggagatggtggtgggcaagaatganag

SEQ ID NO: 786 - DNA, 465 bp, Homo sapiens
  misc_feature 4: n = A,T,C or G
tacnactccctatagggcgaattgggccctctagatgcatgctcgagaagtaattatcagttggtttggatttttggaccaccgttcagtcattttgggttgccgtgctcccaaaacattttaaatgaaagtattggcattcaaaaagacagcagacaaaatgaaagaaaatgagagcagaaagtaagcatttccagcctatctaatttctttagttttctatttgcctccagtgcagtccatttcctaatgtataccagcctactgtactatttaaaatgctcaatttcagcaccgatggccatgtaaataagatgatttaatgttgattttaatcctgtatataaaataaaaagtcacaatgagtttgggcatatttaatgatgattatggagccttagaggtctttaatcattggttcggctgcttttatgtagtttaggctggaaatggtttcacttgctc

SEQ ID NO: 787 - DNA, 671 bp, Homo sapiens
  misc_feature 6, 35, 36: n = A,T,C or G
tatacnactcactatagggcgaattgggccctctnnatgcatgctcgagcggccgcccttttttttttttttttttttgttggaaataatttttatttaacagatataaaaaaaattcttaacatttacaaattgtacaaagattggtagcttttatatttttttaaaaatgctatactaagagaaaaaacaaaagaccacaacaatattccaaattataggttgagagaatgtgactatgaagaaagtattctaaccaactaaaaaaaatattgaaaccacttttgattgaagcaaaatgaataatgctagatttaaaaacagtgtgaaatcacactttggtctgtaaacatatttagctttgcttttcattcagatgtatacataaacttatttaaaatgtcatttaagtgaaccattccaaggcataataaaaaaagaggtagcaaatgaaaattaaagcatttattttggtagttcttcaataatgatgcgagaaactgaattccatccagtagaagcatctccttttgggtaatctgaacaagtgccaacccagatagcaacatccactaatccagcaccaattccttcacaaagtccttccacagaagaagtgcgatgaatattaattgttgaattcatttcagggcttccttggtccaaataaa

SEQ ID NO: 788 - DNA, 357 bp, Homo sapiens
tatacgactcactatagggcgaattgggccctctacatgcatgctcgaggttatggaacagcacatttctagaggaatattccaaactgaactacttggacattctcatgcgagccttcattgatgtgactgctgctgccgaaaatatcaggctgccaaatgcaggcactcaggttcgagtgactgtgtttccctcaaagactgtagctcagtattcgggagtaccttggtggatcatcctagtggctattctcgctgggatcttgatgcttgctttattagtgtttatactatggaagtgtggattctttaaacgctctaggtacgatgacagtgttccccgataccatgctgtaa

SEQ ID NO: 789 - DNA, 611 bp, Homo sapiens
  misc_feature 141: n = A,T,C or G
gaatacgactcactataggggcgaattgggccctctagatgcatgctcgagtcccctttgatttgcgcttcattaattattcatgattcaggttggaaggcctgctgacgaccccctgtggccgttctctgagctttcctntcacatcgtttccttccacgctctttggttccttacggtcctgctccttctgctgtcagaggagcagagagttgatcttattcattctggatacggatactttctagttgatctggataatcaagataacgaccctcaacagcggcggagagggagcagccagttggtgtgtctcagaaaatcccgctgagttccgaggcctcctagatgtggaatcctgctgagagttgttcccaggtcagagaatggagagagcctgtgcatgatgggatatccccgcctagatctttcagtgagtctctgcctcagctactcttaggattagggggagaaccatggtgtcagacatccggaaagaagacgggatgaatgttttacctctgaagtacatcccaaatgtgggagttaacttcagctttgctggggtctatttggccagtgaaactctgcctggttccttcgcacatccg

SEQ ID NO: 790 - DNA, 121 bp, Homo sapiens
agggcgattgggccctctagatgcatgctcgagcggccgcccttttttttttttttttttttttttttttttttttttttttttttttttttttttttttttttttttttttttttttttt

SEQ ID NO: 791 - DNA, 636 bp, Homo sapiens
  misc_feature 2, 32, 295: n = A,T,C or G
cnactcactatagggcgaattgggccctctanatgcatgctcgagcggccgccctttttttttttttttttttttactttgacaacaaattatattttaaatgtttcatatttacttttatatttccatacaatcagaaacagtaaaaaaaatttggagagcacataaaaacatcttaaagttaaaaatataaagccttgtatttaaaaatgcagtcatttaaataatattataagaatctatttgtacataataaacaagtttcaaccagcaagaaattactaatattgactgnggagttttggctgttttaatagttctaactcattattccgtaattcaacacagcactaccaacacagctggcaatgacaagactgggagtatcaaactaggattgttagttcaattaaaatttcagataaacaataatgtacttatactaaaaaattatttgttgtttatctgaaatgaaaatttaactgggtacccaattgtttgtttgtttaatctaaaaaccctgattgaaatttatctaataaaacatcatttaatatctaaaataaaataaatttactataacatctttataactattcaatcaatgattcatcttctatttttccaaattcttgc

SEQ ID NO: 792 - DNA, 499 bp, Homo sapiens
ctcactatagggcgaattgggccctctagatgcatgctcgagcggccgcgtcgacgtttgtagtacctgtgggtttattacctatgggtttatatcctcaaatacgacattctagtcaaagtcttggtaatataaccaatgttttcaaatgtattctgtcatacaaagagcagatttttattgaacttgtgcaataactatattaccatacaatataaatattcatgaatagtttcccaagtctggagcgaccacatagggagaaaatgtaaatgtctcaatttttgttcacaaaagtatattttatcaaattgctgtaagctgtggatagcttaaaagaaaaaaagtttcctgaaatctgggaaacaagacatttaaagaatcagcaaaatttcaaataaaaaattatgaaaatattatcctcattagttcatttagtcccatgaaattaattattttctctgcttgatcttggtggacagtttcatgaagctgtcag

SEQ ID NO: 793 - DNA, 518 bp, Homo sapiens
  misc_feature 195, 477, 486: n = A,T,C or G
ctttttttttttttttttttggctctagagggggtagagggggtgctatagggtaaatacgggccctatttcaaagatttttaggggaattaattctaggacgatgggcatgaaactgtggtttgctccacagatttcagagcattgaccgtagtatacccccggtcgtgtagcggtgaaagtggtttggtttanacgtccgggaattgcatctgtttttaagcctaatgtggggacagctcatgagtgcaagacgtcttgtgatgtaattattatacgaatgggggcttcaatcgggagtactactcgattgtcaacgtcaaggagtcgcaggtcgcctggttctaggaataatgggggaagtatgtaggagttgaagattagtccgccgtagtcggtgtactcgtaggttcagtaccattggtggccaattgatttgatggtaagggagggatcgttgacctcgtctgttatgtnaaggatgcntagggatgggagggcgatgaggactaggatga

SEQ ID NO: 794 - DNA, 78 bp, Homo sapiens
  misc_feature 26: n = A,T,C or G
ctatagggcgaattgggccctctagntgcatgctcgagcggccgcccttttttttttttttttttttttttttttttt

SEQ ID NO: 795 - DNA, 580 bp, Homo sapiens
gaatacgactcactatagggcgaattgggccctctagatgcatgctcgagaggacaaaaagcaagtacagtttgtgtccgagccctgcagcctctccataaacggagtgatcttcggcttgacatccacagatctgcttttccacctgggggccgaggagatcagtagttcttccggaacttcagacagattcagccgaatactcaagcacatcttgacccagaggagctactacccactctacccgccccaagaagacatggccattgactatgagtcgttctatgtttacgcacagctgcctgtcaccccagatgtcctcatcatcccgtcagagctgaggtacttcgtgaaggatgtcctcggctgtgtctgtgtgaaccctgggcgccttaccaaagggcaggtgggaggcaccttcgcccgactctaccttaggaggccggcagcggacggggcagagaggcagagcccatgcattgctgtgcaggtcgtcaggatctgaggcttctgtcctctgctgttctctgctgtgtgggcccttaaagtcttagccaagagccaagacatagccctgtga

SEQ ID NO: 796 - DNA, 634 bp, Homo sapiens
  misc_feature 28: n = A,T,C or G
ctcactatagggcgaattgggccctctncatgcatgctcgagcgcatgggccccgccatgggcccggcccttggcgctggcattgagcgcatgggcctggccatgggtggcggtggcggtgccagctttgaccgtgccatcgagatggagcgtggcaacttcggaggaagcttcgcaggttcctttggtggagctggaggccatgctcctggggtggccaggaaggcctgccagatatttgtgagaaatctgccattcgatttcacatggaagatgctaaaggacaaattcaacgagtgcggccacgtgctgtacgccgacatcaagatggagaatgggaagtccaaggggtgtggtgtggttaagttcgagtcgccagaggtggccgagagagcctgccggatgatgaatggcatgaagctgagtggccgagagattgacgttcgaattgatagaaacgcttaagcagttgccttttttaaacatcgatacgagacctctgaatttgtattttttcttgttaaccattttaatttgttggctggatgtataaagatgtttaaaaaattcagttgctttttggggtaatttgaattacttttttaatgactggggttccatttgactgtttgca

SEQ ID NO: 797 - DNA, 605 bp, Homo sapiens
  misc_feature 585: n = A,T,C or G
ctttttttttttttttatagagctaattggcttttatttgtgatttatgaattaaagcagcaccactctacaagtacagtgatagctccccctgggcaatacaatacaagaacagtgggttttgtcaaattggaacaaggaaacagaaccacagaaataaatacattggttaacatcagattagttcaggttacttttttgtaaaagttaaagtagaggggacttctgtattatgctaactcaagtagactggaatctcctgtgttctttttttttttaaattggttttaattttttttaattggatctatcttcttccttaacatttcagttggagtatgtagcatttagcaccactggctcaatgcgctcacctaggtgagagtgtgaccaaatcttaaagcattagtgctattatcagttaccaccatttggggcttttatccttcatgggttatgatgttctcctgatgacacatttctctgagttttgtaattccagccaaagagagaccattcactatttgatggctggctgcatgcaaacatttaaagcttttagagaatacactacaccagggagtntgactactagtatgactatt

SEQ ID NO: 798 - DNA, 658 bp, Homo sapiens
  misc_feature 2, 31, 32: n = A,T,C or G
cnactcactatagggcgaattgggccctctnnatgcatgctcgagcggccgccctttttttttttttttactttgacaacaaattatattttaaatgtttcatatttacttttatatttccatacaatcagaaacagtaaaaaaaatttggagagcacataaaaacatcttaaagttaaaaatataaagccttgtatttaaaaatgcagtcatttaaataatattataagaatctatttgtacataataaacaagtttcaaccagcaagaaattactaatattgactgtggagttttggctgttttaatagttctaactcattattccgtaattcaacacagcactaccaacacagctggcaatgacaagactgggagtatcaaactaggattgttagttcaattaaaatttcagataaacaataatgtacttatactaaaaaattatttgttgtttatctgaaatgaaaatttaactgggtacccaattgtttgtttgtttaatctaaaaaccctgattgaaatttatctaataaaacatcatttaatatctaaaataaaataaatttactataacatctttataactattcaatcaatgattcatcttctatttttccaaattcttgcacaaatatttgatgcttaaataaataca

SEQ ID NO: 799 - DNA, 652 bp, Homo sapiens
  misc_feature 31: n = A,T,C or G
gactcactatagggcgaattgggccctctanatgcatgctcgagacaaccataaagacttgactaggaaatcaaaaggtttttattaaacaagacttcctctgaggctattcgagcaagcagatttggctataagtcagatacgcaagatttctgaaccatgtataaatacgttctgcagaatttcgaagtgtgcgtcctttgacttttccagggatgcaccaggggccaacccgttatgtagacacggttactgttttaggactgggtgacatggggcctgggtaaaaaaataaggccaaaactgagtaagctcaatttatagagcaatatcagtgctggacagatctgccatgcttcgtttacatcatgtttcctacttttgatttcttcatcttatttatagtcttcctcccatcccctgaacacaaacttgactttatcttctaactaagatctttccactcaagggggcgtaggaaaacaattcctggatgcctttctaactaaaaccagcaggactaagtgctcaagattttataatatttcgatttagaggtttctagagttattcctgagacgtgccatagcagtaaatgaattggtgaattgagtagaaggtagttgtgacatctacacccaaattcttactc

SEQ ID NO: 800 - DNA, 603 bp, Homo sapiens
atgcatgctcgagcggccgccctttttttttttttttttttttactttgacaacaaattatattttaaatgtttcatatttacttttatatttccatacaatcagaaacagtaaaaaaaatttggagagcacataaaaacatcttaaagttaaaaatataaagccttgtatttaaaaatgcagtcatttaaataatattataagaatctatttgtacataataaacaagtttcaaccagcaagaaattactaatattgactgtggagttttggctgttttaatagttctaactcattattccgtaattcaacacagcactaccaacacagctggcaatgacaagactgggagtatcaaactaggattgttagttcaattaaaatttcagataaacaataatgtacttatactaaaaaattatttgttgtttatctgaaatgaaaatttaactgggtacccaattgtttgtttgtttaatctaaaaaccctgattgaaatttatctaataaaacatcatttaatatctaaaataaaataaatttactataacatctttataactattcaatcaatgattcatcttctatttttccaaattcttg

SEQ ID NO: 801 - DNA, 634 bp, Homo sapiens
  misc_feature 36, 604: n = A,T,C or G
tatacgactcactatagggcgaattgggccctctanatgcatgctcgagtggtattatgaggcctcaggtgccttggggtacattgtcatgctataagggatgtatatcataaggtatggtggaagaggggccttatgtgaatgattgccacatactgtttctgttgctgctttttttccgattcctttttgtcattggatttgtttgttttgtcatgtggtgaatggtgttttagttattgtgttgctgccagaatcagaatccagttcttgttcttactgccttatagttattgtgttgccaccagaatcagaatccagttcttgttcatactgccttgtagtgagggcagtttaatatctacaaagaagcttttagaagctgaaaaagtcaatgtgattgtgcattctgcttttaagaagctgtttcagctatgaactgtgtatgtgctataagtgtgaggtaccataagttatttaatttttaaaagaggaaactcctgagtgagctgtttaagaaatctgagtgtgatctattgttacgttatttataactaggtaaaatgtctgtcgtgatagatttcttttaacgttcagatactgnggttgggttgtctatatttaatatgcagat

SEQ ID NO: 802 - DNA, 546 bp, Homo sapiens
  misc_feature 11, 25: n = A,T,C or G
ctatagggcgnattgggccctctanatgcatgctcgagcggccgcctctcctaggctggagggcggcgccccatatgacacagaaggcggctagggatacgccctgtaccatgccggccagtctggattgccctaacgccaggccccgactcgctctggccagcgggcatgcggcgagtttgcccccgcagcgcagccgcccacaactcggtcttccagaggagcgaacgttcggactgcttggtagtttactagggcaaagtaccaccccaccccgagcgagcaagcggacctcaggaaaggggctccttctgtgtaaagtgatcggcaggccttgcagtggatcttcggtgtccatagttatataccaatcactattttgtctacatcatttggactgtgcagaatgagatgccaataatatatcacatacagtaaaagggctattttcacaaaaggtcaaaactgggatatataacctctttcttttgattagtcagactgacttcaaagggggcttagggttgcttattaaagaaaaatgcc

SEQ ID NO: 803 - DNA, 98 bp, Homo sapiens
  misc_feature 18, 72, 74, 90: n = A,T,C or G
ggcgattgggccctctanatgcatgctcgagcggccgcccttttttttttttttttttttttttttttttcnangggaaaaaaaaaatcntttatttt

SEQ ID NO: 804 - DNA, 548 bp, Homo sapiens
  misc_feature 26, 504, 520: n = A,T,C or G
ctataggggcgaattgggccctctanatgcatgctcgagcaccgtcattaccccgagcacctgcagccccaggaagtcctggccgtcctcgctcaccaggagcccctcttggacccatgggtccaggagctccattttcgcctggaagaccattttcaccctttaatccaggagcacctgtttcacccttttctccatttcgtccatcgaagcctctgtgtcctttcataccagggaatccaggtatcccagctggacctttgatacctggaggtccaggcaatcctcgctctccaggtcgtccgggtctacctgattctccatcttttccagcaggaccagatggacctatagcaccaggaggtcctggagggcctgaaggaccagcttgcccaggttcaccagggggtccttggtatcctggagatccaggggaaccaggatgaccagatgtaccagggggaccgggagggcctggggggccagctggtccaggatagcctncgagtcctcctactgntactccagacttgacatcatatgaatca

SEQ ID NO: 805 - DNA, 609 bp, Homo sapiens
  misc_feature 34, 533: n = A,T,C or G
tacgactcactatagggcgaattgggccctctanatgcatgctcgagagagctacctttttccttttatgtataaggacacagctagaaaatgccatgtatgatccagaggcctaatttgttgatcccttaatcttggacttcccaccattgagaacagcgagaaataaatttctgttgtttataagctgccaagttcatagtatttcattacagcagcctgcacagaccaaggcagtatttttttttaatgtcttctaagggaacccccccaaaagtaaacaaaaatctacaaaagttatttgtatgatcaaaatcaaaacattcttattcacgaaatagaagctacagtaaattttcaaaaaataagagttaaaaaactccccccatatgatatattttacagtttcacaagggtaccaggtcgtgaaggaattttattaaatctattaaatcatagatagcttttaataagttcaattttactttaagagctaataagttacttgatattaacctttttacttataaggnaagtgggagatatgacatcataatcttagacatttaaaaaatcctgagaaagattatttcaatcttttacagtttg

SEQ ID NO: 806 - DNA, 633 bp, Homo sapiens
  misc_feature 588, 617: n = A,T,C or G
cttttttttttttttttagataattcaggttgtcatttataattttagagtttgcttcacatatacaatgctgtgttacgaaacaatgaacacttttataaaaaatttatttcacacttttatacaaatatccacaggtaatttctaatcatgaaataattttacaatgctagttagtacaaaaatgtatcaaatgcaaacagaccagtgacttgacttgagatgacatttttaacaaccataaatctaaacaccataacatctttgtttctttgttgaaccaccctcccaacacccttttcaggacattcatcttttttttagtaacacaggtctaaaaacactgtcaaagtatcagctccttagcaatctagcaatctaaacacattagggacacaagttccccaagcaagaaactgagactttaaacactgttataacctgttttacagaaatttttgtaaacaaaatatattttgtgactaagaattccaaagtacaaccaaaacaacgtccttagtatcttaaggtttaagatttccgaaaagaaaaaagcccccccaaaacaacagtggcactacaaactgngttctattctttcaaaacacagacactgnttatactatatccaaa

SEQ ID NO: 807 - DNA, 122 bp, Homo sapiens
  misc_feature 31: n = A,T,C or G
gactcactatagggcgaattgggccctctanatgcatgctcgagcggccgcccttttttttttttttttttttttttttttttttttttttttttttttttttttttttttttttttttaaa

SEQ ID NO: 808 - DNA, 586 bp, Homo sapiens
  misc_feature 6, 36: n = A,T,C or G
tatacnactcactatagggcgaattgggccctctanatgcatgctcgagctccttggcgagcacgtgaccccggcgggcacgcaggagggcaggcaggcccctgcgcaggcgctgggtggactgcttccaggtgtcatattggaagaacttgcccacggggtatctggggaagttgtccggaagcacggtcggaggggtcgacacgtccctctcggacttggcgggggtagcacagtacgtctccaggagggccaggtcacagctgcggaaacagcactcctcaacgatgccacggctgcgacggctcacacggcttgcgggcctgctgaagtagaagccgcggtccccacagacgaactggagggtgtccaccagctccccgccgcacagggtctcactggggcggtaagcagcaatgcagcacgaggcgaaggccaagaaggtgagaagcaccagcatcgacttccccattgggattcccattggtgtagctcagcagaaggctcgctggggcaggaggaggaggaggaagaggaggaggaggaagctggaagtctctttcacaggagaagcgtcgacgcggcc

SEQ ID NO: 809 - DNA, 664 bp, Homo sapiens
  misc_feature 35: n = A,T,C or G
tatacgactcactatagggcgaattgggccctctnatgcatgctcgagcggccgcgtcgaccagcattcgggccgagatgtctcgctccgtggccttagctgtgctcgcgctactctctctttctggcctggaggctatccagcgtactccaaagattcaggtttactcacgtcatccagcagagaatggaaagtcaaatttcctgaattgctatgtgtctgggtttcatccatccgacattgaagttgacttactgaagaatggagagagaattgaaaaagtggagcattcagacttgtctttcagcaaggactggtctttctatctcttgtactacactgaattcacccccactgaaaaagatgagtatgcctgccgtgtgaaccatgtgactttgtcacagcccaagatagttaagtgggatcgagacatgtaagcagcatcatggaggtttgaagatgccgcatttggattggatgaattccaaattctgcttgcttgctttttaatattgatatgcttatacacttacactttatgcacaaaatgtagggttataataatgttaacatggacatgatcttctttataattctactttgagtgctgtctccatgtttgatgtatctgagcaggttgctccacaggtagctctaggagggc

SEQ ID NO: 810 - DNA, 681 bp, Homo sapiens
  misc_feature 591, 593: n = A,T,C or G
ctttttttttttttttttataatatgatcccatttatttaaaaaataaagattacatatttgcttatatacgcatacaaattttctgaaaattacataagaaattgttaatagattacctctggagaatagtactggggtaagaggtgagggggcagaattctcattttacagccttatatactgttgtgaatttttttttttaccatgtactttttaaaaatacaaaattgaggagggaacctcctactccaaaattacgaagcattcttttatgtacatttctctaagagttatatttgatatttttcaaggcaaactgacttgaggtactcgatgtttttaaatgtatttctaataattattagtagggtcacacctatttgacagcttttttaaaaagtcacatattgctgtatttttaaagatgacaaacctttatttaaatgagatgcttgctggagattttctttttcaaactcactttttaagttatggaaataatatcactgctgaaagtttggaaaacatatataagggtgccaaaaataccactaaaatcacataaaccaatcttaccattattaatggngngatttctttctttacatatctattaatacctagtactatctatgtaaaaaatgtgtttgcaaagctgagatcacactgtacctatagc

SEQ ID NO: 811 - DNA, 428 bp, Homo sapiens
ttgggccctctagatgcatgctcgagcggccgcgtcgaccagaaatgcattataaatgtttttaattgtgttctgttttttgcagtctttaagtgccatgccaattgttcttatattctatagaagttcgctcaaaatactcaacaggggaataggcagcggacagtcagaatggttggaattttggctttctaagaaaaactttattttgcataagcatgtggtcagatcattttgtgcatatgcagcctggattggatgttaagtaaatgcttgttcagtgccggtacatttacttaaatctgtttttatttttgtcatgtagaatactactgtggtcatcataatgtaatctatttctgtaccttttttttttttttttactttgaagtctttaaataaaatgtataatacccgtcgacgcggcc

SEQ ID NO: 812 - DNA, 646 bp, Homo sapiens
  misc_feature 37: n = A,T,C or G
gtatacgactcactatagggcgaattgggccctctanatgcatgctcgagagagctacctttttccttttatgtataaggacacagctagaaaatgccatgtatgatccagaggcctaatttgttgatcccttaatcttggacttcccaccattgagaacagcgagaaataaatttctgttgtttataagctgccaagttcatagtatttcattacagcagcctgcacagaccaaggcagtatttttttttaatgtcttctaagggaacccccccaaaagtaaacaaaaatctacaaaagttatttgtatgatcaaaatcaaaacattcttattcacgaaatagaagctacagtaaattttcaaaaaataagagttaaaaaactccccccatatgatatattttacagtttcacaagggtaccaggtcgtgaaggaattttattaaatctattaaatcatagatagcttttaataagttcaattttactttaagagctaataagttacttgatattaacctttttacttataaggtaagtgggagatatgacatcataatcttagacatttaaaaaatcctgagaaagattatttcaatcttttacagtttgggatccgagctcggtaccaagcttggcgtaatca

SEQ ID NO: 813 - DNA, 447 bp, Homo sapiens
  misc_feature 142, 224, 405, 420, 436, 437: n = A,T,C or G
acgactaatatagggcgaatgggccctctagatgcatgctcgagcggccgcccttttttttttttttttttaaagtcatggaggccatggggttggcttgaaaccagctttggggggttcgattccttccttttttgtctanattttatgtatacgggttcttcgaatgtgtggtagggtggggggcatccatatagtcactccaggtttatggagggttcttntactattaggacttttcgctttgaagcgaaggcttctcaaatcatgaaaattattaatattactgctgttagagaaatgaatgagcctacagatgataggatgtttcatgtggtgtatgcatcggggtagtccgagtaacgtcggggcattccggataggccgaaaaagtgttgtgggaanaaagttagatttacnccgatgaatatgatanngaaatggatt

SEQ ID NO: 814 - DNA, 182 bp, Homo sapiens
  misc_feature 158: n = A,T,C or G
atgcatgctcgagcggccgccctttttttttttttttgttttagttcagtttattttttaatatgtcctgagttctttctgttcataaaattatgatcttatgacagctgtaacttttaattaataatattaacaaatcattattgatataggctttncaatttgctcaagattaggaattg

SEQ ID NO: 815 - DNA, 586 bp, Homo sapiens
ctttttttttttttttttttttactttgacaacaaattatattttaaatgtttcatatttacttttatatttccatacaatcagaaacagtaaaaaaaatttggagagcacataaaaacatcttaaagttaaaaatataaagccttgtatttaaaaatgcagtcatttaaataatattataagaatctatttgtacataataaacaagtttcaaccagcaagaaattactaatattgactgtggagttttggctgttttaatagttctaactcattattccgtaattcaacacagcactaccaacacagctggcaatgacaagactgggagtatcaaactaggattgttagttcaattaaaatttcagataaacaataatgtacttatactaaaaaattatttgttgtttatctgaaatgaaaatttaactgggtacccaattgtttgtttgtttaatctaaaaaccctgattgaaatttatctaataaaacatcatttaatatctaaaataaaataaatttactataacatctttataactattcaatcaatgattcatcttctatttttccaaattcttgcaca

SEQ ID NO: 816 - DNA, 620 bp, Homo sapiens
  misc_feature 611: n = A,T,C or G
tgggccctctagatgcatgctcgagctcctcagacctcctcaagtcctccacccgttcgaagaggagcgtcgtcatcaccccaaagaaggcagtccccgtctccaagtactaggcccattaggagagtctccaggactccggaacctaaaaagataaaaaaggctgcttccccaagcccacagtctgtaagaagggtctcatcctcccgatctgtctccgggtctcctgagccagcagctaaaaagcccccagcacctccatcccccgtccagtctcagtcaccgtctacaaactggtcaccagctgtaccggtcaaaaaggccaaaagcccaacaccgagcccatcaccgccaagaaattcagatcaggaaggaggtggaaagaaaaagaagaaaaagaaggacaagaaacacaaaaaggataagaagcacaagaagcacaaaaaacacaagaaggaaaaggctgtggctgcagctgctgcagctgctgtgacccctgcagccattgcagctgccacaaccacattagcacaggaagagccagtggcagcgccagagccgaagaaggagactgaaagtgaagctgaagataaccttgatgatttagaaancacctgcgt

SEQ ID NO: 817 - DNA, 309 bp, Homo sapiens
  misc_feature 32, 148, 161, 179, 183, 221, 246, 252, 253, 275, 280, 285,293: n = A,T,C or G
ctttttttttttttttttctttgctcacattnaatttttattttgattttttttaatgctgcacaacacaatatttatttcatttgtttcttttatttcattttatttgtttgctgctgctgttttatttatttttactgaaagtganagggaacttttgnggccttttttcctttttntgtnggccgccttaagctttctaaatttggaacatttaaacnagctgaagggaaaaaggggtttcgnaaaatnnctcgggggaagggaaagggtgntttgntaatnatgccctntggggggtgattaact

SEQ ID NO: 818 - DNA, 580 bp, Homo sapiens
  misc_feature 278, 297, 322, 332, 374, 462: n = A,T,C or G
tgggccctctagatgcatgctcgagcggccgccctttttttttttttttccttttaaagttttattaaagtttaatggtacaatattttatctctttttttgttaatgccagtacaaaaatacagttgatgacttgacaaaatggctacacctagggcttgaaggtttgagtttctccaacagtaacaagggaaagcatgcttccacctggagccgagtccaagcacacagccagtcctgcacacgcatgcgtgcaaacagggaagctcaagcatganaagaggaaagaggctgtanaaatttgggaagaagcccacaattnttcccagganaaaaaagggaaaaaacaggctgatatccttggtagggggtanaataactgatttacacttaggatttattgttattgttgttgttgttgttttttaatgataagctacttctgcaattttaacgttgtanaaaagatgctactagtctcctttcaccactaaggtgagtaaagtgggaggaaatgggaaaagactcaaatacttaagtgcgaggagtaaacatccaagtggctcaagttttgtgtcaa

SEQ ID NO: 819 - DNA, 639 bp, Homo sapiens
  misc_feature 407, 425, 588, 601, 626, 631: n = A,T,C or G
tatagggcgaattgggccctctagatgcatgctcgagcggccgcccttttttttttttttttttttttagttatagagctaattggcttttatttgtgatttatgaattaaagcagcaccactctacaagtacagtgatagctccccctgggcaatacaatacaagaacagtgggttttgtcaaattggaacaaggaaacagaaccacagaaataaatacattggttaacatcagattagttcaggttacttttttgtaaaagttaaagtagaggggacttctgtattatgctaactcaagtagactggaatctcctgtgttctttttttttttaaattggttttaattttttttaattggatctatcttcttccttaacatttcagttggagtatgtagcatttancaccactggctcaatgcnctcacctaggtgagagtgtgaccaaatcttaaagcattagtgctattatcagttaccaccatttggggcttttatccttcatgggttatgatgttctcctgatgacacatttctctgagttttgtaattccagccaaagagagaccattcactatttgatggntggctgcatgcanacatttaaagcttttagagaatacnctacnccagggag

SEQ ID NO: 820 - DNA, 663 bp, Homo sapiens
  misc_feature 493, 527, 551: n = A,T,C or G
tgggccctctagcatgcatgctcgagcggccgcccttttttttttttttttttacattttttggttcattctgtatcaatgagcagttgtgatatgacagttatgtgtgaattcatctataacagtggattttggggaaatgaataggccaaaaaggaagatattctccaaaactcttaaaatttaaaggttgcagtaggatgctactccagctaattttaagctagccctcctgtattcttacagttatttctctctctctttctttcacacacatgtactcattttcttattctattttataacaatttccccttatgctgacttcgaaaacttattatcttaaaaaatcttattgcatgcattcctgtaagcagctacctcaaacgctttttgagccaggctgaaaataaataaagccaaatttaaaaaaacaaaaacaaaaaacactccaaatcttgccaaactgatgaatcaaatgttttttgattgnattttctttaacctttatctatatgaatacatantttacacatatttatagtcaaggngtttgggtaaaagaacaaaaaatgatttatcctctttcaaagaaaaggactacaaaaggactgaaaaatacttttgggaggccccaggtccaggatccgagctcggtaccaa

SEQ ID NO: 821 - DNA, 653 bp, Homo sapiens
  misc_feature 74, 75, 91, 160, 201, 280, 294, 386, 491, 649: n = A,T,C or G
tagggcgattgggccctctagatgcatgctcgagcggccgccctttttttttttttttttactttgacaacaanntatattttaaatgttncatatttacttttatatttccatacaatcagaaacagtaaaaaaaatttggagagcacataaaaacatnttaaagttaaaaatataaagccttgtatttaaaaatgcagncatttaaataatattataagaatctatttgtacataataaacaagtttcaaccagcaagaaattactaatattgactgnggagttttggctgntttaatagttctaactcattattccgtaattcaacacagcactaccaacacagctggcaatgacaagactgggagtatcaaactaggattgntagttcaattaaaatttcagataaacaataatgtacttatactaaaaaattatttgttgtttatctgaaatgaaaatttaactgggtacccaattgtttgtttgnttaatctaaaaaccctgattgaaatttatctaataaaacatcatttaatatctaaaataaaataaatttactataacatctttataactattcaatcaatgattcatcttctatttttccaaattcttgcacaaatatttgatgcttaaataaatacntaaa

SEQ ID NO: 822 - DNA, 633 bp, Homo sapiens
  misc_feature 527, 590, 613: n = A,T,C or G
tgggccctctagatgcatgctcgagcggccgccctttttttttttttttttagaatatataatatgatcccatttatttaaaaaataaagattacatatttgcttatatacgcatacaaattttctgaaaattacataagaaattgttaatagattacctctggagaatagtactggggtaagaggtgagggggcagaattctcattttacagccttatatactgttgtgaatttttttttttaccatgtactttttaaaaatacaaaattgaggagggaacctcctactccaaaattacgaagcattcttttatgtacatttctctaagagttatatttgatatttttcaaggcaaactgacttgaggtactcgatgtttttaaatgtatttctaataattattagtagggtcacacctatttgacagcttttttaaaaagtcacatattgctgtatttttaaagatgacaaacctttatttaaatgagatgcttgctggagattttctttttcaaactcactttntaagttatggaaataatatcactgctgaaagtttggaaaacatatataagggtgccaaaaatnccactaaaatcacataaaccaantcttaccattattaaatggg

SEQ ID NO: 823 - DNA, 647 bp, Homo sapiens
tacgactcactatagggcgaattgggccctctagcatgcatgctcgagagagctacctttttccttttatgtataaggacacagctagaaaatgccatgtatgatccagaggcctaatttgttgatcccttaatcttggacttcccaccattgagaacagcgagaaataaatttctgttgtttataagctgccaagttcatagtatttcattacagcagcctgcacagaccaaggcagtatttttttttaatgtcttctaagggaacccccccaaaagtaaacaaaaatctacaaaagttatttgtatgatcaaaatcaaaacattcttattcacgaaatagaagctacagtaaattttcaaaaaataagagttaaaaaactccccccatatgatatattttacagtttcacaagggtaccaggtcgtgaaggaattttattaaatctattaaatcatagatagcttttaataagttcaattttactttaagagctaataagttacttgatattaacctttttacttataaggtaagtgggagatatgacatcataatcttagacatttaaaaaatcctgagaaagattatttcaatcttttacagtttgggatccgagctcggtaccaagcttggcgtaatcatgg

SEQ ID NO: 824 - DNA, 229 bp, Homo sapiens
gcatgctcgagcggccgccctttttttttttttttttttatttttaaaactttattttaaaaatatgagcatctattttaaaagttttgataattattgccattattttcttgtgattggtacaatttaaaaataagtctatgttttcacattgattttaaaaaatatagcatgtttgaattacaaatgattaagcaaactctattacttcatagctgaccatcttcca

SEQ ID NO: 825 - DNA, 621 bp, Homo sapiens
  misc_feature 58, 76, 113, 121, 128, 145, 156, 161, 168, 237, 247, 259,392, 396, 480, 521, 562, 604: n = A,T,C or G
tgggccctctagatgcatgctcgagcggccgccctttttttttttttttgaaatttanaaacaaattttatttaanatctgaaatacaattcctaaaatatcaacttttccanaaaaccgnggctacncaataatgcattgcctntatcatgttanaacgngcattanactcaaatacaaaaaccatgaaacaaatcaccatccttcaacaatttgagcaaagatagaatgcctaanaacaacatanatggacttgcanaggatgggctgttttacttcaagcaccataaaaaaaaaaaagagcacaaatgcatgggttttcaggtatatacattaagttgaacctttggcactaggaatcagggcgttttgtcacatagcattaacacatnttanaaaattgtgtagtgtcaaagggataggaaccaccagcattcaagcaatgttgtcaactaggcaataaaatgttctactgaatgnttcttctttgttctaattactgcatacactgggtagcaacnttgaaatgagaaaaggagcttacactccttttattttctgnttaaaacagaacgggaaacaaactgaaacataagccctgttntacattaacgattttaa

SEQ ID NO: 826 - DNA, 391 bp, Homo sapiens
  misc_feature 373: n = A,T,C or G
tacgactcactatagggcgaattgggccctctagcatgcatgctcgagccctctctgacagattgtttagatctaatccatcaatattccaggtaatgagagagaacatgctgccattttcttgctgagtatcttcagatgggctgattttagaagtggtggaatcagttgtttcttcattggttaggtcaacataggtcttgggctcagagatggtttcaggtcggcgttccaaggcgctctcctccaccggaggctcgaagtaggagttcagagccctttccatctcccagtcgttctcggccaggaagcactgagccactgcggcatcgcagctctagttctagatcgcgagcggccgctcgcgatctanaactaggtcgacgcggcc

SEQ ID NO: 827 - DNA, 713 bp, Homo sapiens
  misc_feature 34, 35: n = A,T,C or G
tatacgactcatatagggcgaattgggccctctnnatgcatgctcgaggtggtggcagggccgccccctgcagtccggagacgaacgcacggaccgggcctccggaggcaggttcggctggaaggaaccgctctcgcttcgtcctacacttgcgcaaatgtctccgagcttactcacatagcatattggtatatcaaaatgaaatgcaaggaaccaaaaataacataattgaaggcagtaaaagtgaaattaaataggaagatcatcagtcaaggaagacccactggagaggacagaaaatgaagcagtgttttatcatgtgtatttcagcaggtcttcttgaaatttaactaaaaatatgactgctctctcttcagagaactgctcttttcagtaccagttacgtcaaacaaaccagcccctagatgttaactatctgctattcttgatcatacttgggaaaatattattaaatatccttacactaggaatgagaagaaaaaacacctgtcaaaattttatggaatatttttgcatttcactagcattcgttgatcttttacttttggtaaacatttccattatattgtatttcagggattttgtacttttaagcattaggttcactaaataccacatctgcctatttactcaaattatttcctttacttatggctttttgcattatccagttttcctgacagcttgtatag

SEQ ID NO: 828 - DNA, 145 bp, Homo sapiens
agcatgctcgagcggccgcgacgcccgccgcagctggggcgatccacgggaatgggcccggctcgcgtccagagtcgccgccgccgccggccccccgggtgcccgggcccccctcgcgggggaccgtgcccccgccgccggggcc

SEQ ID NO: 829 - DNA, 87 bp, Homo sapiens
  misc_feature 68: n = A,T,C or G
attgggccctctagatgcatgctcgagcggccgccctttttttttttttttttttttttttttttttnttttttttttttttttact

SEQ ID NO: 830 - DNA, 579 bp, Homo sapiens
  misc_feature 362, 439, 443, 573: n = A,T,C or G
ctttttttttttttttactttgacaacaaattatattttaaatgtttcatatttacttttatatttccatacaatcagaaacagtaaaaaaaatttggagagcacataaaaacatcttaaagttaaaaatataaagccttgtatttaaaaatgcagtcatttaaataatattataagaatctatttgtacataataaacaagtttcaaccagcaagaaattactaatattgactgtggagttttggctgttttaatagttctaactcattattccgtaattcaacacagcactaccaacacagctggcaatgacaagactgggagtatcaaactaggattgttagttcaattaaaatttcanataaacaataatgtacttatactaaaaaattatttgttgtatatctgaaatgaaaatttaactgggtacccaattgnttgnttgtttaatctaaaaaccctgattgaaatttatctaataaaacatcatttaatatctaaaataaaataaatttactataacatctttataactattcaatcaatgattcatcttctatttttccaaattnttgcac

SEQ ID NO: 831 - DNA, 428 bp, Homo sapiens
  misc_feature 382, 392: n = A,T,C or G
gcatgctcgagcaccgtcattaccccgagcacctgcagccccaggaagtcctggccgtcctcgctcaccaggagcccctcttggacccatgggtccaggagctccattttcgcctggaagaccattttcaccctttaatccaggagcacctgtttcacccttttctccatttcgtccatcgaagcctctgtgtcctttcataccagggaatccaggtatcccagctggacctttgatacctggaggtccaggcaatcctcgctctccaggtcgtccgggtctacctgattctccatcttttccagcaggaccagatggacctatagcaccaggaggtcctggagggcctgaaggaccagcttgcccaggttcaccagggggnccttggtatnctggagatccaggggaaccaggatgaccagatgtac

SEQ ID NO: 832 - DNA, 648 bp, Homo sapiens
  misc_feature 6: n = A,T,C or G
cgactnatatagggcgaattgggccctctagatgcatgctcgagcggccgccctttttttttttttttttactttgacaacaaattatattttaaatgtttcatatttacttttatatttccatacaatcagaaacagtaaaaaaaatttggagagcacataaaaacatcttaaagttaaaaatataaagccttgtatttaaaaatgcagtcatttaaataatattataagaatctatttgtacataataaacaagtttcaaccagcaagaaattactaatattgactgtggagttttggctgttttaatagttctaactcattattccgtaattcaacacagcactaccaacacagctggcaatgacaagactgggagtatcaaactaggattgttagttcaattaaaatttcagataaacaataatgtacttatactaaaaaattatttgttgtttatctgaaatgaaaatttaactgggtacccaattgtttgtttgtttaatctaaaaaccctgattgaaatttatctaataaaacatcatttaatatctaaaataaaataaatttactataacatctttataactattcaatcaatgattcatcttctatttttccaaattcttgcacaaatatttgatgctt

SEQ ID NO: 833 - DNA, 677 bp, Homo sapiens
  misc_feature 2, 6, 552, 614: n = A,T,C or G
cnactnatatagggcgaattgggccctctagatgcatgctcgagcggccgcccttttttttttttttttttttaggttattaaataatttgtttattgtacggcatttacaaagaaaacagacaatgccctcagtagaaagaataaaaatgtatttagggctttatttttaactgacagcaaatagaaatcctttagtgagatcgtggcaatttgacagtattataattaagctcaataaaggtacatggggtacctggaagatcaagatctacagctgcctatttccacatctttcaatccatctggctccttaaataggggaaaaagcccttatttggtggagaagcatttccaaaatgaagttacaggttctattaaaacttactgtcacatcaactgttaaaatagggccttttgtgttttgttatttcaccttaatatcaccagaattcctgtaattccacaattgtgattttactatgtagaagataattcagttctagtctattgctttagatgtaaaaacagctgaaaacccaaagtggattanaattgctgaaggatttccctgccgttgtttgatacaatctattctcttgattcttgataggngcatagaaagcctaacttaaaattctttctacaggaacatgtctgatttcaggagtacccaat

SEQ ID NO: 834 - DNA, 687 bp, Homo sapiens
  misc_feature 11, 36, 37, 38, 577, 601, 605, 674: n = A,T,C or G
tatacgactcnctatagggcgaattgggccctctannngcatgctcgagaggacaaaaacccacaccggacatagatcacaaaacttcctagaactctcctttaaatcggaagaaatttgtaaaatgtgatatgaaatacaactctacaaacatccaaaatacatttctggtcataattaatcgtatttgacattttcctctaagtttaatgcaactttaaataatttaggctttttcctaacatgatagatttttttcagtatcagaaatggacaagaggaaactccagtaaagagaaaagcaatgaatttaaaagggtgcagaatctgaaaacaaactaaccacaatgtacatttaattgtacttaattgtatatttcatttaaatagtccttctcaggggtttaataatttagaatcaatagttcccttcaaaacataataaaatatttacactttataaaatattaaccgattaacaatacagccgtgttgtttataagagtgtaactgaagtcctgcaaatcatgctgttgacacaagcctgtgaggttagcgaagtgatccttagcaaaantgtaaatgaagatcttcagacagngggngtttataaaatagctcattaatgacttaggattgaatcgctccaaccattcgcatcatcagatataatnatagtgacgaatc

SEQ ID NO: 835 - DNA, 615 bp, Homo sapiens
  misc_feature 33, 34, 417, 469, 487, 549, 611: n = A,T,C or G
cgactcactatagggcgaattgggccctctagnngcatgctcgagcggccgccctttttttttttttttttggttattaaataatttgtttattgtacggcatttacaaagaaaacagacaatgccctcagtagaaagaataaaaatgtatttagggctttatttttaactgacagcaaatagaaatcctttagtgagatcgtggcaatttgacagtattataattaagctcaataaaggtacatggggtacctggaagatcaagatctacagctgcctatttccacatctttcaatccatctggctccttaaataggggaaaaagcccttatttggtggagaagcatttccaaaatgaagttacaggttctattaaaacttactgtcacatcaactgttaaaatagggccttttgngttttgttatttcaccttaatatcaccagaattcctgtaattccacaattgngattttactatgtagaanataattcagttctagtctattgctttagatgtaaaaacagctgaaaacccaaagtggattanaattgctgaaggatttccctgccgttgtttgatacaatctattctcttgattcttgataggngcat

SEQ ID NO: 836 - DNA, 591 bp, Homo sapiens
actatagggcgaattgggccctctacatgcatgctcgagccaggctgtgctggccagctcagcgtccctggaagggaagggacaactgaagttcacctcaggacggtggagcccacatcataactgcacccaggtggccacagcgaacgacaccaccctccgtggctgggacacccggagcatgagccagatctactgcatagagaatgcccacggacagctggtgcgggaccttgactttaatcccaataagcagtactacttggccagctgcggagacgactgtaaggtgaagttctgggacacccgaaatgtcaccgaacccgtgaagaccctggaggagcactcccactgggtgtggaacgtccgctacaaccactctcatgaccagctggtcctcacgggcagcagtgacagcagagtcatcctttccaacatggtgtccatctcgtcggagcccttcggccacttggtagacgacgatgacatcagtgaccaggaggaccaccgttctgaagagaagagcaaggagcccctgcaggacaacgtgatcgccacctacgaggagcacgaggacagcgtctatgccgt

SEQ ID NO: 837 - DNA, 397 bp, Homo sapiens
  misc_feature 63: n = A,T,C or G
tgggccctctagatgcatgctcgagctcatcagaagaaccttctcatgcctctcgacgactgngtgatgtggacatagactacagaccttatctctgtaaggcatggcagcaactggtgaagcacaggatgtttttctccaaacaagatgattctcaaagcagcaaccaattttcattagtttcacgttgtttaaaaagtaacagtttaaaaaaacatttttttattattggagaaagtggggttgaattttgttgatatacatcataaaatagtcttttgcagggtactacgcaagccttaaaatttttcttaagacagagtcttgctctgtctcccaggctggagtgcagtggcacaatcatggctcactgcagccttgaactcctggcctcaag

SEQ ID NO: 838 - DNA, 232 bp, Homo sapiens
cactatagggcgaattgggccctctagatgcatgctcgagaggcggagaggatcatgtccgggaactgcggggtagtagcgatctgggttacccagccgttgtggcccttgagggtgccacgaagggtcatctgctcagtcatggcggcggcgagagcgtgtgtcgctgcagcgacgaggatggcactggatggcttagagaaactagcaccacaacctcgtcgacgcggcc

SEQ ID NO: 839 - DNA, 593 bp, Homo sapiens
  misc_feature 33: n = A,T,C or G
tacgactcctatagggcgaattgggccctctanatgcatgctcgagttatcagtgcagtcataaaggggccagaggttaaatcggaagcagtggcaaaaaagcaagaacatgatgtgaaaactttgcagctagtagaagaaaaaccagcagatggaaataagacagtgacccacgtagtggttgtcagtgcgccttcagctattgcccttcctgtaactatgaaaacagaaggactagtgacatgtgagaaataaaatagcagctccaccatggacttcaggctgttagtggcagtactgacataaacatttgcaagggaagtcatcaagaaaagtcaaagaagactttaaaacatttttaatgcatatacaaaaacaatcagacttactggaaataaattacctatcccatgtttcagtgggaaatgaactacatattgagatgctgacagaaaactgcctcttacagtaggaaacaactgaacccatcaataagaaaaaggatcgaaagggaccaagcagctcactacgatatcaagttacactaagacttggaacactaacattctgtaagaggttatatagttttcagt

SEQ ID NO: 840 - DNA, 601 bp, Homo sapiens
  misc_feature 165, 180, 334, 404, 493, 495, 535, 544, 548, 557: n = A,T,C or G
tatagggcgaattgggccctctagcatgcatgctcgagcggccgccctttttttttttttttttttttttttttttttactggggaagcatatttaatgcacacatttgaatgttacacataaataattttaacgatggagtccaagttctggattttacattanatctgcatatataanacacttgtggtcaaatttcaagattggtaaagccagtttcaagctgcttatattttgagtacaggtttcactattacaaatatatgatgttaaactaacaaactcatgaccttcaaagatgtcttcgtcccacgcacacccatttgtaatttgngtccatttgctatttcccttcttctataatcttcaaattatatagttatgcattgagttccctatgcatntcacccatctcctttatctcagccttctcatactttgccattctcttctttctggaaataaccagcacaacaattccagcaacaactgntntcaccacaaccacaataacagcaataacaccagcttttanaccctgcantganaattcaggngctttttcatcaacataataaattaaagtttgaccaggatccga

SEQ ID NO: 841 - DNA, 257 bp, Homo sapiens
  misc_feature 10: n = A,T,C or G
tacgactcantatagggcgaattgggccctctacatgcatgctcgagataaaaccatcaagctatggaataccctgggtgtgtgcaaatacactgtccaggatgagagccactcagagtgggtgtcttgtgtccgcttctcgcccaacagcagcaaccctatcatcgtctcctgtggctgggacaagctggtcaaggtatggaacctggctaactgcaagctgaagaccaaccacattggccacacaggctatctga

SEQ ID NO: 842 - DNA, 661 bp, Homo sapiens
  misc_feature 3, 608, 630: n = A,T,C or G
acnactaattatagggcgaattgggccctctagatgcatgctcgagcggccgcgtcgacagcattcgggccgagatgtctcgctccgtggccttagctgtgctcgcgctactctctctttctggcctggaggctatccagcgtactccaaagattcaggtttactcacgtcatccagcagagaatggaaagtcaaatttcctgaattgctatgtgtctgggtttcatccatccgacattgaagttgacttactgaagaatggagagagaattgaaaaagtggagcattcagacttgtctttcagcaaggactggtctttctatctcttgtactacactgaattcacccccactgaaaaagatgagtatgcctgccgtgtgaaccatgtgactttgtcacagcccaagatagttaagtgggatcgagacatgtaagcagcatcatggaggtttgaagatgccgcatttggattggatgaattccaaattctgcttgcttgctttttaatattgatatgcttatacacttacactttatgcacaaaatgtagggttataataatgttaacatggacatgatcttctttataattctactttgagtgctgnctccatgtttgatgtatctgancaggttgctccacaggtagctctaggagggc

SEQ ID NO: 843 - DNA, 633 bp, Homo sapiens
  misc_feature 2, 292: n = A,T,C or G
cnactcactatagggcgaattgggccctctacatgcatgctcgagcggccgcccttttttttttttttttttactttgacaacaaattatattttaaatgtttcatatttacttttatatttccatacaatcagaaacagtaaaaaaaatttggagagcacataaaaacatcttaaagttaaaaatataaagccttgtatttaaaaatgcagtcatttaaataatattataagaatctatttgtacataataaacaagtttcaaccagcaagaaattactaatattgactgnggagttttggctgttttaatagttctaactcattattccgtaattcaacacagcactaccaacacagctggcaatgacaagactgggagtatcaaactaggattgttagttcaattaaaatttcagataaacaataatgtacttatactaaaaaattatttgttgtttatctgaaatgaaaatttaactgggtacccaattgtttgtttgtttaatctaaaaaccctgattgaaatttatctaataaaacatcatttaatatctaaaataaaataaatttactataacatctttataactattcaatcaatgattcatcttctatttttccaaattcttgc

SEQ ID NO: 844 - DNA, 95 bp, Homo sapiens
  misc_feature 47: n = A,T,C or G
gcatgctcgagcggccgcccttttttttttttttttttttttttttntttttttttttttttttttttttttttttttttaaaggggaaaacccg

SEQ ID NO: 845 - DNA, 564 bp, Homo sapiens
cttttttttttttttttacactcagattgtttatttaaaaatgcccaaaacacaaaaatagacttttaaggtaataatatatattactaaatatattatagtctacttataataattatatcgtcgttttcaatattacaaaaaaaggaagaaaaatacaagggaagcagacgacccaatatatataaatactataaaatcatattagaataaataaagtcgtcataaataaagggcccattgatttatgggtggggtttggcaacggctttggctacttgcttttggagggtaatttgagcaccaggattccccctcaggagaggttccagttaccaggagacactggaacctcaggtctataaaaactggaggggcagtgaaggcctattattcacagcacataagattctaggagacagatttgggcagggaagaggtgggggagagggttcattgcctcccttaaatatgctacaatttttttttcccccaagaacctcggaagacactccatcccccaccatcatgaatactgagcttgcacacttggggaactgcccc

SEQ ID NO: 846 - DNA, 536 bp, Homo sapiens
  misc_feature 520: n = A,T,C or G
tgtgcgcgccccgcctgctggaccacttcatctgtgagctgccggcgttgctcaagctggcctgcggaggcgacggagacactaccgagaaccagatgttcgccgcccgcgtggtcatcctgctgctgccgtttgccgtcatcctggcctcctacggtgccgtggcccgagctgtctgttgcatgcggttcagcggaggccggaggagggcggtgggcacgtgtgggtcccacctgacagccgtctgcctgttctacggctcggccatctacacctacctgcagcccgcgcagcgctacaaccaggcacggggcaagttcgtatcgctcttctacaccgtggtcacacctgctctcaacccgctcatctacaccctcaggaataagaaagtgaagggggcagcgaggaggctgctgcggagtctggggagaggccaggctgggcagtgagtagttggggaggggagaaagtattaagccagaacccaaggatggaaataccccttagtgagtcagtttanacttcaggctgttcat

SEQ ID NO: 847 - DNA, 285 bp, Homo sapiens
gccaactcacacaaggcaggtgagtgaggaaatccagagttgccatggagaaaaatccagtgtcagcattcttgctccttgtggccctctcctacactctggccagagataccacagtcaaacctggagccaaaaaggacacaaaggactctcgacccaaactgccccagaccctctccagaggttggggtgaccaactcatctggactcagacatatgaagaagctctatataaatccaagacaagcaacaaacccttgatgattattcatcacttggatgagt

SEQ ID NO: 848 - DNA, 455 bp, Homo sapiens
cttttttttttttttttactgctaatttgggacgttttatttattggaaaggttctttcaagggaacttttctgcaagaccaagcaatgtatgtatttttctttggtaaattacaatttacattggcacaaaaaacacatggtgactaatgtactttgctctaggacaattaaagaaaatgtattttatcctcacaaatccagtgaagccttcattttatttctaaaagtttaaggaaggtctagtctaccagttataaaaatgaaaaccagttcaactctaatataaacattatttacatttgtttataaaaatagatttgagtttaggaaaagttgaacaactagttatttttacttcagttattaggtacaatgaattccttgatttttcaaggctgaccctgtttccttggttaacaatttcaatttaggccttataggaaaaaacgtaag

SEQ ID NO: 849 - DNA, 92 bp, Homo sapiens
tgggccctctagatgcatgctcgagcggccgccctttttttttttttttttttttttttttttttttttttttttttttttttttttttttt

SEQ ID NO: 850 - DNA, 430 bp, Homo sapiens
  misc_feature 2, 7, 290, 358, 360, 375, 419: n = A,T,C or G
cnactcntatagggcgaattgggccctctacatgcatgctcgagtgcaagctggaggcagactgagtcctcggatgcttcggccagttctgactctagaggacaatacatacctctcatcaaagtagccagaacggattttactggcatctagatccgtggtgtgcttcattgtccgggggtcatatccattgtgtcgctcttggatcacagggtcaaacaggtcagcaaatacctcataggtctcctcatctccagccaccatgcccacagtcttgatgaaggggtggncagggttgtccacgccagtctggatacactgatctagcgtccaaccagtgggtgtggtcttgtcgcananccgtgcatagactgntggggtcaggtgactggccatgcagttgttgtgctttcggaggnctgggtactca

SEQ ID NO: 851 - DNA, 537 bp, Homo sapiens
  misc_feature 179, 234, 418, 433, 516: n = A,T,C or G
ttgggccctctagatgcatgctcgagcggccgcccttttttttttttttttttttttttggctctagagggggtagagggggtgctatagggtaaatacgggccctatttcaaagatttttaggggaattaattctaggacgatgggcatgaaactgtggtttgctccacagatttcanagcattgaccgtagtatacccccggtcgtgtagcggtgaaagtggtttggtttanacgtccgggaattgcatctgtttttaagcctaatgtggggacagctcatgagtgcaagacgtcttgtgatgtaattattatacgaatgggggcttcaatcgggagtactactcgattgtcaacgtcaaggagtcgcaggtcgcctggttctaggaataatgggggaagtatgtaggagttgaanattagtccgccgtantcggtgtactcgtaggttcagtaccattggtggccaattgatttgatggtaagggagggatcgttgacctcgtctgttatgtnaaggatgcctagggatgggag

SEQ ID NO: 852 - DNA, 595 bp, Homo sapiens
  misc_feature 11, 35, 36: n = A,T,C or G
gtatacgactnatatagggcgaattgggccctctnnatgcatgctcgagaagtaattatcagttggtttggatttttggaccaccgttcagtcattttgggttgccgtgctcccaaaacattttaaatgaaagtattggcattcaaaaagacagcagacaaaatgaaagaaaatgagagcagaaagtaagcatttccagcctatctaatttctttagttttctatttgcctccagtgcagtccatttcctaatgtataccagcctactgtactatttaaaatgctcaatttcagcaccgatggccatgtaaataagatgatttaatgttgattttaatcctgtatataaaataaaaagtcacaatgagtttgggcatatttaatgatgattatggagccttagaggtctttaatcattggttcggctgcttttatgtagtttaggctggaaatggtttcacttgctctttgactgtcagcaagactgaagatggcttttcctggacagctagaaaacacaaaatcttgtaggtcattgcacctatctcagccataggtgcagtttgcttctacatgatgctaaaggctgcgaatg

SEQ ID NO: 853 - DNA, 468 bp, Homo sapiens
  misc_feature 6, 287: n = A,T,C or G
cgactnatatagggcgaattgggccctctagatgcatgctcgagcggccgcccttttttttttttttttttaagtgaagaagaaaatcctttattttttgatgagcaaaaataataaattgctgttcacactggataagaccatatcaaaagtgacagtaaacatgtacactgttggtgttatatggggatggggttctcggtaattttgtttattatttatgtttattattatgttttatcattaattattcaataaatttttatttaaaaagtcaccctacttanaaatcttctgtgggggtgggagggacaaaagattacaaaccaaaactcaggagatggtaacactggaattgataaaatcacctgggattagttgtataactctgaaccaccaaacctctgctatcaagccttgctacagtcatggctgtccagaaagatttacagttatttttctgagaaa

SEQ ID NO: 854 - DNA, 559 bp, Homo sapiens
  misc_feature 21: n = A,T,C or G
tacgactccactatagggcgnattgggccctctagatgcatgctcgagtggtattatgaggcctcaggtgccttggggtacattgtcatgctataagggatgtatatcataaggtatggtggaagaggggccttatgtgaatgattgccacatactgtttctgttgctgctttttttccgattcctttttgtcattggatttgtttgttttgtcatgtggtgaatggtgttttagttattgtgttgctgccagaatcagaatccagttcttgttcttactgccttatagttattgtgttgccaccagaatcagaatccagttcttgttcatactgccttgtagtgagggcagtttaatatctacaaagaagcttttagaagctgaaaaagtcaatgtgattgtgcattctgcttttaagaagctgtttcagctatgaactgtgtatgtgctataagtgtgaggtaccataagttatttaatttttaaaagaggaaactcctgagtgagctgtttaagaaatctgagtgtgatctattgttacgttatttataactaggt

SEQ ID NO: 855 - DNA, 548 bp, Homo sapiens
gccaactcacacaaggcaggtgagtgaggaaatccagagttgccatggagaaaaatccagtgtcagcattcttgctccttgtggccctctcctacactctggccagagataccacagtcaaacctggagccaaaaaggacacaaaggactctcgacccaaactgccccagaccctctccagaggttggggtgaccaactcatctggactcagacatatgaagaagctctatataaatccaagacaagcaacaaacccttgatgattattcatcacttggatgagtgcccacacagtcaagctttaaagaaagtgtttgctgaaaataaagaaatccagaaattggcagagcagtttgtcctcctcaatctggtttatgaaacaactgacaaacacctttctcctgatggccagtatgtccccaggattatgtttgttgacccatctctgacagttagagccgatatcactggaagatattcaaaccgtctctatgcttacgaacctgcagatacagctctgttgcttgacaacatgaagaaagctctc

SEQ ID NO: 856 - DNA, 548 bp, Homo sapiens; identical to SEQ ID NO: 855

SEQ ID NO: 857 - DNA, 555 bp, Homo sapiens
  misc_feature 38, 151, 236, 302, 343, 345, 350, 364, 386, 398, 422, 437,441, 508: n = A,T,C or G
ctttttttttttttttttttttttttttttttttaagncaacgtatctatttttattatgaaacattaaattttgacacattgcctcatttgcttttttaaaatctattatctgacttaaacctattcagcaaaaatgccaataaattatnttaatcatactttgggtctttttaaaactaggaacataatatgttttatgataaacaataatactaaatctgagttgtatgaacntgttaacttgaaatttgttttaaatgtttagcttaaaacaaaaagaaaaccaatcacattaatacnctgttgcaaaagtttctccggaatgccctccacatcactgngngtcancatccttcggcttnttcactgaggtatggaatgcanccatatgtaggngtcaaggcactcattctaagctgncctatcctgcacatnttancaatcacattaaatggagggctgatgatatgcactaactcccaacccaggctatcttgcttttaaanaaactaatttctttaaaagaaaatcatcaactaaggactcaaatgct

SEQ ID NO: 858 - DNA, 482 bp, Homo sapiens
  misc_feature 234, 266, 283, 357, 364, 382, 419: n = A,T,C or G
ctttttttttttttttccatataaatcttttacttaaaagtcatataaaagaataaaaaatgcagatttctgaatcaactgtagataaggaagcaaatgatgttgaaaggtgcccattaatttaaaatttcatcataggaatttgggtgaccttttgcactcagtattaaaaaaaaccatcaagttgctctttggaacagtagcatttaggtttgtttttttttttttttttgncaaacttgtttatttctttgggatgttgctgngtgtcatggaaaaaacnctcccctgaaaactgtaaccaaacaaagtttggttaaaacaaagttggttcctttgttttcatggaaatgtcanacaactntgaaaagctaaggaagcntgttgaactgaaggtctggctttggtaaattaggcanagatgttctcagcagcaaacaggtaaaatctgacatcgagaagcattattttaatgtaggacc

SEQ ID NO: 859 - DNA, 312 bp, Homo sapiens
ctatagggcgaattgggccctctacatgcatgctcgagaaaagccctacaagtgcactaagtgtggcaaggccttcacccgcagctccaccctcactctgcatcacagaatccatgccagagagagagcctctgagtacagcccagcctcccttgatgcatttggcgcgttcctgaaaagttgtgtgtaaaggaagaatttgccatcaagccatttcccccttttgtttctaaaattatttcagagatgtgtgctcctggagggaaaaagaaatacagcctcaacagattaaaaaacaaaagtcacacttaa

SEQ ID NO: 860 - DNA, 535 bp, Homo sapiens
  misc_feature 431, 435, 438: n = A,T,C or G
gccaactcacacaaggcaggtgagtgaggaaatccagagttgccatggagaaaaatccagtgtcagcattcttgctccttgtggccctctcctacactctggccagagataccacagtcaaacctggagccaaaaaggacacaaaggactctcgacccaaactgccccagaccctctccagaggttggggtgaccaactcatctggactcagacatatgaagaagctctatataaatccaagacaagcaacaaacccttgatgattattcatcacttggatgagtgcccacacagtcaagctttaaagaaagtgtttgctgaaaataaagaaatccagaaattggcagagcagtttgtcctcctcaatctggtttatgaaacaactgacaaacacctttctcctgatggccagtatgtccccaggattatntttnttnacccatctctgacagttagagccgatatcactggaagatattcaaaccgtctctatgcttacgaacctgcagatacagctctgttgcttgacaacat

SEQ ID NO: 861 - DNA, 604 bp, Homo sapiens
  misc_feature 12: n = A,T,C or G
gtatacgactcnctatagggcgaattgggccctctagatgcatgctcgagaagtaattatcagttggtttggatttttggaccaccgttcagtcattttgggttgccgtgctcccaaaacattttaaatgaaagtattggcattcaaaaagacagcagacaaaatgaaagaaaatgagagcagaaagtaagcatttccagcctatctaatttctttagttttctatttgcctccagtgcagtccatttcctaatgtataccagcctactgtactatttaaaatgctcaatttcagcaccgatggccatgtaaataagatgatttaatgttgattttaatcctgtatataaaataaaaagtcacaatgagtttgggcatatttaatgatgattatggagccttagaggtctttaatcattggttcggctgcttttatgtagtttaggctggaaatggtttcacttgctctttgactgtcagcaagactgaagatggcttttcctggacagctagaaaacacaaaatcttgtaggtcattgcacctatctcagccataggtgcagtttgcttctacatgatgctaaaggctgcgaatgggatccga

SEQ ID NO: 862 - DNA, 254 bp, Homo sapiens
cgactcctatagggcgaattgggccctctagatgcatgctcgagataaaaccatcaagctatggaataccctgggtgtgtgcaaatacactgtccaggatgagagccactcagagtgggtgtcttgtgtccgcttctcgcccaacagcagcaaccctatcatcgtctcctgtggctgggacaagctggtcaaggtatggaacctggctaactgcaagctgaagaccaaccacattggccacacaggctatctga

SEQ ID NO: 863 - DNA, 492 bp, Homo sapiens
  misc_feature 183, 352, 386, 481: n = A,T,C or G
ctaactatagggcgaattgggccctctagatgcatgctcgagcggccgcgtcgaccttttttttttttttttttttacactcagattgtttatttaaaaatgcccaaaacacaaaaatagacttttaaggtaataatatatattactaaatatattatagtctacttataataattatatcgncgttttcaatattacaaaaaaaggaagaaaaatacaagggaagcagacgacccaatatatataaatactataaaatcatattagaataaataaagtcgtcataaataaagggcccattgatttatgggtggggtttggcaacggctttggctacttgcttttggagggnaatttgagcaccaggattccccctcaggagaggntccagttaccaggagacactggaacctcaggtctataaaaactggaggggcagtgaaggcctattattcacagcacataagattctaggagacanatttgggcagg

SEQ ID NO: 864 - DNA, 128 bp, Homo sapiens
  misc_feature 2: n = A,T,C or G
cntgcatgccatggggtacaaacagagagttctacagttactccaacattaccaggtgaaactctcacttacgtatggaaaatcccagaaagatctggagctggaacagaggattctgcttgtattcc

SEQ ID NO: 865 - DNA, 365 bp, Homo sapiens
  misc_feature 7, 31: n = A,T,C or G
cgactcntatagggcgaattgggccctctanatgcatgctcgagtctacccatccaagcagtttgacgttctgaaggatgactatgactacgtgttaatcagcagcgtcctctttggcctggtttttgccaccatgatcactaagagactggcacaggtgaagctcctgaatcgggcctggcgataaagaacaaagactgtgcctaaaagtggagagccaggggagtgtgggtcagataagcagctacagctgcagtttggtggattggtggagtatgtgtgtgtgtcagtgctcagctaagaactgtagggaagatggatgaccttcacgcagaactccttttgggatatacatgatgcagaaa

SEQ ID NO: 866 - DNA, 559 bp, Homo sapiens
  misc_feature 67, 203, 237, 244, 390, 399, 405, 473, 510, 515: n = A,T,C or G
cttttttttttttttttttttttttttgagacagggtctcactccatcacccaggctggactgcagnggaaatgattatcatatatattttctctcttccttttgaatgtacacaatgtaacaagagtgacagacctgaaattacaatcaccaaacaaacccaagatagttgttgtccactttcattggcaaatacagcacanaggacattgtctgcgaattgggatgtcatcaaanaggaggnggtggaggctcatttcctttattactctcttttaaatttaggttttctaaagcaacatctaaaggcataatatctacacagcccatagcaccaaaatctgccatctccccccgatcatcctcatctgaggatgagctctcttcacncactaaagnggacanaaggagctcttggacaaacaggctgcggtctgcacgctcgctttccatggactggcgctccgtttcanacattttaggatcattcaacctgtgtaagttaaaaanaaaanaccttattgttaaaaagtcaatgaacaatggcatggccaatttc

SEQ ID NO: 867 - DNA, 668 bp, Homo sapiens
  misc_feature 32, 33: n = A,T,C or G
cgactcctatagggcgaattgggccctctagnngcatgctcgagcggccgccctttttttttttttttttactttgacaacaaattatattttaaatgtttcatatttacttttatatttccatacaatcagaaacagtaaaaaaaatttggagagcacataaaaacatcttaaagttaaaaatataaagccttgtatttaaaaatgcagtcatttaaataatattataagaatctatttgtacataataaacaagtttcaaccagcaagaaattactaatattgactgtggagttttggctgttttaatagttctaactcattattccgtaattcaacacagcactaccaacacagctggcaatgacaagactgggagtatcaaactaggattgttagttcaattaaaatttcagataaacaataatgtacttatactaaaaaattatttgttgtatatctgaaatgaaaatttaactgggtacccaattgtttgtttgtttaatctaaaaaccctgattgaaatttatctaataaaacatcatttaatatctaaaataaaataaatttactataacatctttataactattcaatcaatgattcatcttctatttttccaaattcttgcacaaatatttgatgcttaaataaatacataaataata

SEQ ID NO: 868 - DNA, 461 bp, Homo sapiens
  misc_feature 280, 433: n = A,T,C or G
gactcattatagggcgaattgggccctctagatgcatgctcgagcggccgccctttttttttttttttgaagaagaaaatcctttattttttgatgagcaaaaataataaattgctgttcacactggataagaccatatcaaaagtgacagtaaacatgtacactgttggtgttatatggggatggggttctcggtaattttgtttattatttatgtttattattatgttttatcattaattattcaataaatttttatttaaaaagtcaccctacttanaaatcttctgtgggggtgggagggacaaaagattacaaaccaaaactcaggagatggtaacactggaattgataaaatcacctgggattagttgtataactctgaaccaccaaacctctgctatcaagccttgctacagtcatggctgtccanaaagatttacagttatttttctgagaaa

SEQ ID NO: 869 - DNA, 495 bp, Homo sapiens
  misc_feature 76: n = A,T,C or G
atagggcgaattgggccctctagatgcatgctcgagcggccgccctttttttttttttttgctaatttgggacgtnttatttattggaaaggttctttcaagggaacttttctgcaagaccaagcaatgtatgtatttttctttggtaaattacaagttacattggcacaaaaaacacatggtgactaatgtactttgctctaggacaattaaagaaaatgtattttatcctcacaaatccagtgaagccttcattttatttctaaaagtttaaggaaggtctagtctaccagttataaaaatgaaaaccagttcaactctaatataaacattatttacatttgtttataaaaatagatttgagtttaggaaaagttgaacaactagttatttttacttcagttattaggtacaatgaattccttgatttttcaaggctgaccctgtttccttggttaacaatttcaatttaggccttataggaaaaaacgtaag

SEQ ID NO: 870 - DNA, 588 bp, Homo sapiens
tgcatgctcgagcggccgcagcgaggagaagatctcggactcggaggggtttaaagccaatttgtctctcttgaggaggcctggagagaaaacttacacacagcgatgtcggttgtttgttgggaatctacctgctgatatcacggaggatgaattcaaaagactatttgctaaatatggagaaccaggagaagtttttatcaacaaaggcaaaggattcggatttattaagcttgaatctagagctttggctgaaattgccaaagccgaactggatgatacacccatgagaggtagacagcttcgagttcgctttgccacacatgctgctgccctttctgttcgtaatctttcaccttatgtttccaatgaactgttggaagaagcctttagccaatttggtcctattgaaagggctgttgtaatagtggatgatcgtggaagatctacagggaaaggcattgttgaatttgcttctaagccagcagcaagaaaggcatttgaacgatgcagtgaaggtgttttcttactgacgacaactcctcgtccagtcattgtggaaccacttgaacaactagatgatgaaga

SEQ ID NO: 871 - DNA, 283 bp, Homo sapiens
gccaactcacacaaggcaggtgagtgaggaaatccagagttgccatggagaaaaatccagtgtcagcattcttgctccttgtggccctctcctacactctggccagagataccacagtcaaacctggagccaaaaaggacacaaaggactctcgacccaaactgccccagaccctctccagaggttggggtgaccaactcatctggactcagacatatgaagaagctctatataaatccaagacaagcaacaaacccttgatgattattcatcacttggatga

SEQ ID NO: 872 - DNA, 105 bp, Homo sapiens
tgctcgagcgggccgcccttttttttttttttttttttttttttttttttttttttttttttttttttttttttttttttttttttttttttttaaaagggccaa

SEQ ID NO: 873 - DNA, 680 bp, Homo sapiens
  misc_feature 32, 33, 385: n = A,T,C or G
cgactcctatagggcgaattgggccctctagnngcatgctcgagaggacaaaaacccacaccggacatagatcacaaaacttcctagaactctcctttaaatcggaagaaatttgtaaaatgtgatatgaaatacaactctacaaacatccaaaatacatttctggtcataattaatcgtatttgacattttcctctaagtttaatgcaactttaaataatttaggctttttcctaacatgatagatttttttcagtatcagaaatggacaagaggaaactccagtaaagagaaaagcaatgaatttaaaagggtgcagaatctgaaaacaaactaaccacaatgtacatttaattgtacttaattgtatatttcatttaaatantccttctcaggggtttaataatttagaatcaatagttcccttcaaaacataataaaatatttacactttataaaatattaaccgattaacaatacagccgtgttgtttataagagtgtaactgaagtcctgcaaatcatgctgttgacacaagcctgtgaggttagcgaagtgatccttagcaaaatgtaaatgaagatcttcagacagtggtgtttataaaatagctcattaatgacttaggattgaatcgctccaaccattcgcatcatcagatataataatagtgacgaatc

SEQ ID NO: 874 - DNA, 523 bp, Homo sapiens
  misc_feature 460: n = A,T,C or G
cttttttttttttttttaagaacaaggggtcaatttattttaagtaaatttgtcattaaatatcaatgtgtacaatttcaaacatttataaatcttccaatttatagaaaaattaatgtaatcttaaaattatttgaacagtggctttcacaattatttacaatgaactcaacctacttttgtagaaacatttatgtttaaaagtacccctgccacaaagtgatcatttcacagtacctttctataatatttatgtcacttaagtggtggctgcatcaataaaacctagcagattcaataaattagaaacagcacaatcagaacagtcaataaagctaccattgattccaaacaaaacagaaccttttatagtaagatataaatgttttcccattcagcactcattgaaaaaaataattaggaggcaatcttttcttcactgtttactacaaaacaaggnaattttaagatatttttaaaaattgatgttaagaagcaggattaggtaacttcttataatatg

SEQ ID NO: 875 - DNA, 257 bp, Homo sapiens
  misc_feature 35, 36: n = A,T,C or G
tacgactcactatagggcgaattgggccctctagnngcatgctcgagataaaaccatcaagctatggaataccctgggtgtgtgcaaatacactgtccaggatgagagccactcagagtgggtgtcttgtgtccgcttctcgcccaacagcagcaaccctatcatcgtctcctgtggctgggacaagctggtcaaggtatggaacctggctaactgcaagctgaagaccaaccacattggccacacaggctatctga

SEQ ID NO: 876 - DNA, 548 bp, Homo sapiens; identical to SEQ ID NO: 855

SEQ ID NO: 877 - DNA, 643 bp, Homo sapiens
  misc_feature 21: n = A,T,C or G
tagggcgaattgggccctctnatgcatgctcgagcggccgcctgtggtccttggctcggctcgtggtcccagtgttggtggccacaggggtgcttgtatcacccctcccccagctccaggcagttcagcacagagagagagagagactctgtttgggggacagtaagggaagggaacaagtctctaccccgtaatccaggaaattctcccagatcttaccgaagactaccaaggcattacctctacaagtctgtaggagccacagtgttaggcttggggtgccccccgatgcagatatggctgcagtgaccaaagacttacatcacaaaactcaaatctcttcaaatacttggaaggccttcctaagaaggatgagtacaaacaagcccagtgatatggtttggatttgtgttcccaccccaaatctcaagttgaattgtaatccccaatgttggaggtggaggcctgatgaaaggtgattagaccatgggggcagatttacccattggtgctgtttttgtgacagtgagtgagttctgatgagatctggtcacttaaaaatgtatggcaccttcctccccccacttcctcctgctccaatcatgtgaagtgccttgttccccctttgccttcttctgcgata

SEQ ID NO: 878 - DNA, 482 bp, Homo sapiens
  misc_feature 35, 231, 409: n = A,T,C or G
tatacgactcattatagggcgaattgggccctctnatgcatgctcgagcggccgccctttttttttttttttaaacaaataaaattctttatttaaatttctcttgtggggaaaatatttttctttaaagcacacttaaaagtaatttgcatttacttcctgtaaagcatttccatttcacaattagcaaaactaaaaggctatgtctcttcatgcatttatttttgttanaaaaatgtcccatggtgctatcaaaccgattttaaccatcatcaagcttaactttgcctctgttgacaacatgactacaaacatgaatcaaaaaggagttaaggaattttaagccataaggtttcaattatagcttaccaattatgtaattagctgacaaaaatcaagtctgatgtanaatagctgtcatctacttaactgcagataatcatggcattttcatttaagatgatctgaacttatgaaataaa

SEQ ID NO: 879 - DNA, 639 bp, Homo sapiens
  misc_feature 12, 13: n = A,T,C or G
gtatacgactcnntatagggcgaattgggccctctagatgcatgctcgagtcggccagctggatctcccacaaggtttccttgttaaaagggtgcttaagtaacctggccggcagcacgacttatgatgaagcacgaagaagccaggttctgtgtcgatcactctctcagtcccctcaactgctcatcttaaactatttggttcctgacacgtttccaaaaggggaaaggggaaaaggggaaggggggaaggggaacataaaaagtatttgttacatttaaaaagggggggaaggggaaagagctgtatctatgttcacctcattcaacttccttgagttatggcactatgatgttgcttaattaggtaagacatggatatttgcaccgagtgcaaatactgttcataacaaggtcatagctagaaagacagatgggctcaagtgtggacaaataatgtcatcaaggtaatagatcaaaaatattaaagccctataaaagatctgagcagtcaactccaaaacatccacatgacaaagtccttaaaatacaaatctcattactcttactcatgcaactgctaaaaaatagtgtgcagatatgtatttatatttgccttaaccttcaaaatctagggaca

SEQ ID NO: 880 - DNA, 548 bp, Homo sapiens; identical to SEQ ID NO: 855

SEQ ID NO: 881 - DNA, 257 bp, Homo sapiens; identical to SEQ ID NO: 841
  misc_feature 10: n = A,T,C or G

SEQ ID NO: 882 - DNA, 362 bp, Homo sapiens
  misc_feature 6, 11: n = A,T,C or G
agtttnggctnttttaatagttctaactcattattccgtaattcaacacagcactaccaacacagctggcaatgacaagactgggagtatcaaactaggattgttagttcaattaaaatttcagataaacaataatgtacttatactaaaaaattatttgttgtttatctgaaatgaaaatttaactgggtacccaattgtttgtttgtttaatctaaaaaccctgattgaaatttatctaataaaacatcatttaatatctaaaataaaataaatttactataacatctttataactattcaatcaatgattcatcttctatttttccaaattcttgcacaaatatttgatgcttaaataa

SEQ ID NO: 883 - DNA, 528 bp, Homo sapiens
gccaactcacacaaggcaggtgagtgaggaaatccagagttgccatggagaaaaatccagtgtcagcattcttgctccttgtggccctctcctacactctggccagagataccacagtcaaacctggagccaaaaaggacacaaaggactctcgacccaaactgccccagaccctctccagaggttggggtgaccaactcatctggactcagacatatgaagaagctctatataaatccaagacaagcaacaaacccttgatgattattcatcacttggatgagtgcccacacagtcaagctttaaagaaagtgtttgctgaaaataaagaaatccagaaattggcagagcagtttgtcctcctcaatctggtttatgaaacaactgacaaacacctttctcctgatggccagtatgtccccaggattatgtttgttgacccatctctgacagttagagccgatatcactggaagatattcaaaccgtctctatgcttacgaacctgcagatacagctctgttgcttg

SEQ ID NO: 884 - DNA, 450 bp, Homo sapiens
  misc_feature 5: n = A,T,C or G
actcnctatagggcgaattgggccctctacatgcatgctcgagcggccgccctttttttttttttttttatcaatactttggttttattttaaaacagtgaaaagaaaaataaatatctgaagaataagaatacagggctgggtgcagtggctcatgcctgcaatcccagcactttgggaggcggaggcaggtggaccgcttgagcccaggagttcgagaccagcctgggcaacacagtgagacccccctctttacaaaaaaatacaaaaattagccaggtgtggtggtgcacctgtagtcccagctacttgagaggctgaggtgggagggtcacttgaacccaggagtcggaggttacagtgagccctgatgggccactgcactccaacctgggcaacggagcaagaccctgtctaaaaaaaaaaaaaaagaatacaggagtggggtgg

SEQ ID NO: 885 - DNA, 571 bp, Homo sapiens
  misc_feature 8, 245, 444, 536: n = A,T,C or G
tacgactnatatagggcgaattgggccctctagatgcatgctcgagcggccgccctttttttttttttttggctctagagggggtagagggggtgctatagggtaaatacgggccctatttcaaagatttttaggggaattaattctaggacgatgggcatgaaactgtggtttgctccacagatttcagagcattgaccgtagtatacccccggtcgtgtagcggtgaaagtggtttggtttanacgtccgggaattgcatctgtttttaagcctaatgtggggacagctcatgagtgcaagacgtcttgtgatgtaattattatacgaatgggggcttcaatcgggagtactactcgattgtcaacgtcaaggagtcgcaggtcgcctggttctaggaataatgggggaagtatgtaggagttgaagattagtccgccgtantcggtgtactcgtaggttcagtaccattggtggccaattgatttgatggtaagggagggatcgttgacctcgtctgttatgtaaaggatgcntagggatgggagggcgatgaggactaggatgatgg

SEQ ID NO: 886 - DNA, 681 bp, Homo sapiens
  misc_feature 23, 443, 649: n = A,T,C or G
tatagggcgaattgggccctctnatgcatgctcgaggtgggatttgctcgtttgctcttaaagcactcatcagatgttgtagggggaaattcgagatttaaagatttttaacaagaatttacaaagcctcattttgggagtaatttggggtcttcctttttctgaaaaatccagtgatcttatggcattttatttcattgtattctttcactcttcgaagtttaagagttccaccgccaaagggaagcagtttcattctctatagccaaaagctgtcaccagttgagtctgaatttgttattttccagaaacaccattttgaaaagttgcaactgaggccccttggccggcaaatctgagctgcagaagcgcctgaattccggacgttaaacctccaatcaccagccagggcagctccggctgggacagcgcgggcgcgcggnccctccaccgccgccaaacggagcgcgcttgacgcccccgttttgacttcagctcagaaagacaagtctttgtaatgcaagttcctcttccctagagagttgacgcaccacctgccaccatctctacccctagccctggagcggcctgcagaactgggactcttctcttgtggatttcaatcgtggggcgtgtaactgttgcccanaattttcagagacctggatccgagctcggtac

SEQ ID NO: 887 - DNA, 535 bp, Homo sapiens
gccaactcacacaaggcaggtgagtgaggaaatccagagttgccatggagaaaaatccagtgtcagcattcttgctccttgtggccctctcctacactctggccagagataccacagtcaaacctggagccaaaaaggacacaaaggactctcgacccaaactgccccagaccctctccagaggttggggtgaccaactcatctggactcagacatatgaagaagctctatataaatccaagacaagcaacaaacccttgatgattattcatcacttggatgagtgcccacacagtcaagctttaaagaaagtgtttgctgaaaataaagaaatccagaaattggcagagcagtttgtcctcctcaatctggtttatgaaacaactgacaaacacctttctcctgatggccagtatgtccccaggattatgtttgttgacccatctctgacagttagagccgatatcactggaagatattcaaaccgtctctatgcttacgaacctgcagatacagctctgttgcttgacaacat

SEQ ID NO: 888 - DNA, 563 bp, Homo sapiens
  misc_feature 33, 93, 142, 162, 297, 301, 376, 383, 405, 442, 445, 473,500, 507: n = A,T,C or G
cttttttttttttttttttttttttttttaggntattaaataatttgtttattgtacggcatttacaaagaaaacagacaatgccctcagtanaaagaataaaaatgtatttagggctttatttttaactgacagcaaatanaaatcctttagtgagatcgnggcaatttgacagtattataattaagctcaataaaggtacatggggtacctggaagatcaagatctacagctgcctatttccacatctttcaatccatctggctccttaaataggggaaaaagcccttatttggngganaagcatttccaaaatgaagttacaggttctattaaaacttactgtcacatcaactgttaaaatagggccttttgngttttgntatttcaccttaatatcaccanaattcctgtaattccacaattggattttactatgtanaanataattcagttctagtctattgctttanatgtaaaaacagctgaaaacccaaagnggattanaattgctgaaggatttccctgccgttgtttgatacaatctattctcttgattcttg

SEQ ID NO: 889 - DNA, 137 bp, Homo sapiens
  misc_feature 50, 70: n = A,T,C or G
agcatgctcgagcggccgcgacgcccgccgcatctggggcgatccacagncatagggcccggctcgcgtncagagtcgccgccgccgccggccccccgggtgcccgggcccccctcgcgggggaccgtgcccccgcc

SEQ ID NO: 890 - DNA, 584 bp, Homo sapiens
  misc_feature 7, 288, 295, 444, 526, 540, 550, 581: n = A,T,C or G
gactcantatagggcgaattgggccctctagatgcatgctcgagcggccgccctttttttttttttttgacagtagagatgggcacgggggagggtcttgcgatgctgcccaagctggtcttgaactgctggccttgagtgatcctcctgccttggcctctcaaagtgctcggattacagtgtaagccacggaacccagccccatcatgcctttaagtgttcaatgcacagaatagatagaggccaatagtccatttcaatcagattttaaaaaaagtaatgcaaaanatggganaatttattgctgttacttattatgcaataatttactttaaaatacttcaaatataaactgtgtaatggatgtgtgctgtgtaatttaacttcaatcttgttctgggggtaagttagtatttgaagcacctcaatcaggtggctaggaanatgctttaaacacttatctaaatatacgccagagtgttcatcagcataagggatattagtaatttttcactgatgaatgcancctgaaaagtaggnggatgtctanacttttagaggcaaaatgcatgaaatgaggngta

SEQ ID NO: 891 - DNA, 507 bp, Homo sapiens
  misc_feature 350: n = A,T,C or G
gccctctagatgcatgctcgagcggccgcccttttttttttttttttacactcagattgtttatttaaaaatgcccaaaacacaaaaatagacttttaaggtaataatatatattactaaatatattatagtctacttataataattatatcgtcgttttcaatattacaaaaaaaggaagaaaaatacaagggaagcagacgacccaatatatataaatactataaaatcatattagaataaataaagtcgtcataaataaagggcccattgatttatgggtggggtttggcaacggctttggctacttgcttttggagggtaatttgagcaccaggattccccctagngagaggttccagttaccaggagacactggaacctcaggtctataaaaactggaggggcagtgaaggcctattattcacagcacataagattctaggagacagatttgggcagggaagaggtgggggagagggttcattgcctcccttaaatatgcta

SEQ ID NO: 892 - DNA, 556 bp, Homo sapiens
  misc_feature 12, 36: n = A,T,C or G
tatacgactcantatagggcgaattgggccctctanatgcatgctcgagcaaattcagcttgttttctggtttgagagttctcaggcttgctcaggtggcggagcagttggcaccctggtgttccttggggacaccatggcctactcttatattgaattccaaagtataaactaggcaccattttacttgctaaagattacttcatttgtggtcattattaactcatgacccagaactgagaaataaatagcctgtcaagcaggattggccattttcttactgatctgttcatattaacgtgttccttgctcatttgttttgctgatccagcaggctatcaggagtagatattaatggtttaagaaaatgtaatggaagaaaaatacctccttaaatttgggatcattctatttattaacttagttttcttcccttggaaatcaggcaagcactgccatttttcatgaaaatgcctctggccaatgtgaactccatgacaccagggacttcagctgtcttaattagtgttatagcccagcattcagcctagggcct

SEQ ID NO: 893 - DNA, 399 bp, Homo sapiens
tgggccctctagatgcatgctcgagtcggccagctggatctcccacaaggtttccttgttaaaacgggtgcttaagtaacctggccggcagcacgacttatgatgaagcacgaagaagccaggttctgtgtcgatcactctctcagtcccctcaactgctcatcttaaactatttggttcctgacacgtttccaaaaggggaaaggggaaaaggggaaggggggaaggggaacataaaaagtatttgttacatttaaaaagggggggaaggggaaagagctgtatctatgttcacctcattcaacttccttgagttatggcactatgatgttgcttaattaggtaagacatggatatttgcaccgagtgcaaatactgttcataacaaggtcatagcta

SEQ ID NO: 894 - DNA, 134 bp, Homo sapiens
  misc_feature 73, 74: n = A,T,C or G
agggcgattgggccctctagatgcatgctcgagcggccgcccttttttttttttttttttttttttttttttnntttttttttttttttttttttttttttttttttttttttttttttttttttttttttttt

SEQ ID NO: 895 - DNA, 695 bp, Homo sapiens
  misc_feature 9, 667: n = A,T,C or G
tacgactcntatagggcgaattgggccctctagatgcatgctcgagtctgtggcagagtaggctttaaatctgcaggtgatcccacaaacaccatctaagcaaatgactgggctctcctctccctccacaggatgctttaccagagttactgatgaagttcctcaaggacagttcttagccttccttcctccatgagcagattctggctttgggggacatgcaaaagatcaataaagcagaaagcaaaaaataaattagaggcctgaggaactacaaaactagataatcagcctctaagtaaatgggagttggccacactttgagattaacagagtaatgtatttgaaggaatgagtatagatctgcactgtctaatatggtagccactagtcacatttggctacaaagacttgaaatatggtgatggtttgaattgagatgtgtttaatacacactgaatttcaaaggcctaatatgaaaaaaagtaaaataactcattaataatttttatattgatcctatgttgaaatgatagtgtttttgagctattggggttaaataaaatatatttaaatcaataccatgggtttctttttacttttaaaaaaatgtgggtactagaaacatttaaattacagatgtggctctcattatagtatttacagnggacagtgcatctctagatgcctatacc

SEQ ID NO: 896 - DNA, 556 bp, Homo sapiens
gccaactcacacaaggcaggtgagtgaggaaatccagagttgccatggagaaaaatccagtgtcagcattcttgctccttgtggccctctcctacactctggccagagataccacagtcaaacctggagccaaaaaggacacaaaggactctcgacccaaactgccccagaccctctccagaggttggggtgaccaactcatctggactcagacatatgaagaagctctatataaatccaagacaagcaacaaacccttgatgattattcatcacttggatgagtgcccacacagtcaagctttaaagaaagtgtttgctgaaaataaagaaatccagaaattggcagagcagtttgtcctcctcaatctggtttatgaaacaactgacaaacacctttctcctgatggccagtatgtccccaggattatgtttgttgacccatctctgacagttagagccgatatcactggaagatattcaaaccgtctctatgcttacgaacctgcagatacagctctgttgcttgacaacatgaagaaagctctcaagttgct

SEQ ID NO: 897 - DNA, 604 bp, Homo sapiens
gactcactatagggcgaattgggccctctagatgcatgctcgagtgcaagctggaggcagactgagtcctcggatgcttcggccagttctgactctagaggacaatacatacctctcatcaaagtagccagaacggattttacttgcatctagatccgtggtgtgcttcattgtccgggggtcatatccattgtgtcgctcttggatcacagggtcaaacaggtcagcaaatacctcataggtctcctcatctccagccaccatgcccacagtcttgatgaaggggtggccagggttgtccacgccagtctggatacactgatctagcgtccaaccagtgggtgtggtcttgtcgcagagccgtgcatagactgctggggtcaggtgactggccatgcagttgttgtgctttcggaggtctgggtactcagcgctcgggggatacagcctccgtcgttcactggcagctcgtacaggttccggtcggagcagaaacccagcggctagagaccccgctccggccaaagccaggagcctgagtcccgggcgggcggacagcagacgggagaagggaccagccatggcttgaggtctggctacggga

SEQ ID NO: 898 - DNA, 642 bp, Homo sapiens
  misc_feature 36: n = A,T,C or G
tatacgactcactatagggcgaattgggccctctanatgcatgctcgagtcggccagctggatctcccacaaggtttccttgttaaaagggtgcttaagtaacctggccggcagcacgacttatgatgaagcacgaagaagccaggttctgtgtcgatcactctctcagtcccctcaactgctcatcttaaactatttggttcctgacacgtttccaaaaggggaaaggggaaaaggggaaggggggaaggggaacataaaaagtatttgttacatttaaaaagggggggaaggggaaagagctgtatctatgttcacctcattcaacttccttgagttatggcactatgatgttgcttaattaggtaagacatggatatttgcaccgagtgcaaatactgttcataacaaggtcatagctagaaagacagatgggctcaagtgtggacaaataatgtcatcaaggtaatagatcaaaaatattaaagccctataaaagatctgagcagtcaactccaaaacatccacatgacaaagtccttaaaatacaaatctcattactcttactcatgcaactgctaaaaaatagtgtgcagatatgtatttatatttgccttaaccttcaaaatctagggacataaa

SEQ ID NO: 899 - DNA, 646 bp, Homo sapiens
  misc_feature 31: n = A,T,C or G
gactcactatagggcgaattgggccctctanatgcatgctcgagtggtattatgaggcctcaggtgccttggggtacattgtcatgctataagggatgtatatcataaggtatggtggaagaggggccttatgtgaatgattgccacatactgtttctgttgctgctttttttccgattcctttttgtcattggatttgtttgttttgtcatgtggtgaatggtgttttagttattgtgttgctgccagaatcagaatccagttcttgttcttactgccttatagttattgtgttgccaccagaatcagaatccagttcttgttcatactgccttgtagtgagggcagtttaatatctacaaagaagcttttagaagctgaaaaagtcaatgtgattgtgcattctgcttttaagaagctgtttcagctatgaactgtgtatgtgctataagtgtgaggtaccataagttatttaatttttaaaagaggaaactcctgagtgagctgtttaagaaatctgagtgtgatctattgttacgttatttataactaggtaaaatgtctgtcgtgatagatttcttttaacgttcagatactgtggttgggttgtctatatttaatatgcagatttgcctgctggaatcat

SEQ ID NO: 900 - DNA, 520 bp, Homo sapiens
gccaactcacacaaggcaggtgagtgaggaaatccagagttgccatggagaaaaatccagtgtcagcattcttgctccttgtggccctctcctacactctggccagagataccacagtcaaacctggagccaaaaaggacacaaaggactctcgacccaaactgccccagaccctctccagaggttggggtgaccaactcatctggactcagacatatgaagaagctctatataaatccaagacaagcaacaaacccttgatgattattcatcacttggatgagtgcccacacagtcaagctttaaagaaagtgtttgctgaaaataaagaaatccagaaattggcagagcagtttgtcctcctcaatctggtttatgaaacaactgacaaacacctttctcctgatggccagtatgtccccaggattatgtttgttgacccatctctgacagttagagccgatatcactggaagatattcaaaccgtctctatgcttacgaacctgcagatacagctct

SEQ ID NO: 901 - DNA, 285 bp, Homo sapiens
  misc_feature 49, 208, 220: n = A,T,C or G
aactgagttggaatgaaacatatgaagaacctctatataaatccaaganaagcaacaaacccttgatgattattcatcacttggatgaagtgcccacacagtcaagctttaaagaaagtgtttgctgaaaataaagaaatccagaaattggcagagcagtttgtcctcctcaatctggtttatgaaacaactgacaaacacctttctnctgatggccagnatgtccccaggattatgtttgttgacccatctctgacagttagagccgatatcactggaagatat

SEQ ID NO: 902 - DNA, 483 bp, Homo sapiens
  misc_feature 7, 32, 410: n = A,T,C or G
cgactcnctatagggcgaattgggccctctanatgcatgctcgagcggccgcccttttttttttttttttttttaacaaataaaattctttatttaaatttctcttgtggggaaaatatttttctttaaagcacacttaaaagtaatttgcatttacttcctgtaaagcatttccatttcacaattagcaaaactaaaaggctatgtctcttcatgcatttatttttgttagaaaaatgtcccatggtgctatcaaaccgattttaaccatcatcaagcttaactttgcctctgttgacaacatgactacaaacatgaatcaaaaaggagttaaggaattttaagccataaggtttcaattatagcttaccaattatgtaattagctgacaaaaatcaagtctgatgtanaatagctgtcatctacttaactgcagataatcatggcattttcatttaagatgatctgaacttatgaaataaa

SEQ ID NO: 903 - DNA, 589 bp, Homo sapiens
  misc_feature 425, 426, 588: n = A,T,C or G
gtcgacagacagcagagcacacaagcttctaggacaagagccaggaagaaaccaccggaaggaaccatctcactgtgtgtaaacatgacttccaagctggccgtggctctcttggcagccttcctgatttctgcagctctgtgtgaaggtgcagttttgccaaggagtgctaaagaacttagatgtcagtgcataaagacatactccaaacctttccaccccaaatttatcaaagaactgagagtgattgagagtggaccacactgcgccaacacagaaattattgtaaagctttctgatggaagagagctctgtctggaccccaaggaaaactgggtgcagagggttgtggagaagtttttgaagagggctgagaattcataaaaaaattcattctctgtggtatccaagaatcagtgaagatnncagtgaaacttcaagcaaatctacttcaacacttcatgtattgtgtgggtctgttgtagggttgccagatgcaatacaagattcctggttaaatttgaatttcagtaaacaatgaatagtttttcattgtaccatgaaatatccagaacatacttatatgtna

SEQ ID NO: 904 - DNA, 712 bp, Homo sapiens
  misc_feature 681, 700: n = A,T,C or G
gtcgacttttttttttatagatacaattggcttttatttgtgattcatgagtcagggcagtttccattctgcaaaatatagtgatagctcctactgggcaatacaacagtagaacagtgggttttgtaaaatgggaatccaggaacagaagaatataaataaattgatttaaataaactgattggttaatttcagaatacttcatattacttttttctaagagttaaagcagaaaggactttcttactgtgctgactcagacagcctggactctcatgtttttaggaaaattttgtctgttctgggatctacctgcttcctcatgtttcagtgtgagtatatggcatttagcatgactggctccattctggagtcaccaggctgtcacctaaatgagagtttgactaaacataaggcattaacactactgtcagttaccatcattttggacttccatcattcataggttatgatgtcctcctaatcatacatttatttgagtttttgtcattccagccaaagagagaatatttgacatttgacgaatggctgcatgcaaacatttaaaggttttagagaatacagcacaccagggtaactaatattgtgacaatcaggaggatcacaccaagagtttgaagtatgatccataggcagagaccccatgaaccaaaccaaatnaaagagaatagattaaagnatgagccacatg

SEQ ID NO: 905 - DNA, 541 bp, Homo sapiens
gccaactcacacaaggcaggtgagtgaggaaatccagagttgccatggagaaaaatccagtgtcagcattcttgctccttgtggccctctcctacactctggccagagataccacagtcaaacctggagccaaaaaggacacaaaggactctcgacccaaactgccccagaccctctccagaggttggggtgaccaactcatctggactcagacatatgaagaagctctatataaatccaagacaagcaacaaacccttgatgattattcatcacttggatgagtgcccacacagtcaagctttaaagaaagtgtttgctgaaaataaagaaatccagaaattggcagagcagtttgtcctcctcaatctggtttatgaaacaactgacaaacacctttctcctgatggccagtatgtccccaggattatgtttgttgacccatctctgacagttagagccgatatcactggaagatattcaaaccgtctctatgcttacgaacctgcagatacagctctgttgcttgacaacatgaagaa

SEQ ID NO: 906 - DNA, 479 bp, Homo sapiens
  misc_feature 9, 406: n = A,T,C or G
tacgactcntatagggcgaattgggccctctagatgcatgctcgagcggccgccctttttttttttttttaacaaataaaattctttatttaaatttctcttgtggggaaaatatttttctttaaagcacacttaaaagtaatttgcatttacttcctgtaaagcatttccatttcacaattagcaaaactaaaaggctatgtctcttcatgcatttatttttgttagaaaaatgtcccatggtgctatcaaaccgattttaaccatcatcaagcttaactttgcctctgttgacaacatgactacaaacatgaatcaaaaaggagttaaggaattttaagccataaggtttcaattatagcttaccaattatgtaattagctgacaaaaatcaagtctgatgtanaatagctgtcatctacttaactgcagataatcatggcattttcatttaagatgatctgaacttatgaaataaa

SEQ ID NO: 907 - DNA, 556 bp, Homo sapiens; identical to SEQ ID NO: 896

SEQ ID NO: 908 - DNA, 581 bp, Homo sapiens
  misc_feature 74, 159, 162, 327: n = A,T,C or G
cttttttttttttttttttttctatgacaatgacatttatttaacacgttatttcacattgtacaaatccttanattctctttattcactggtccatttctacaacaaatacatccaaaacactatataataaaattatttacaacatttccaaatganaanattgcttttgcccccactactgctattcacacacagtacttccacggcacaatacattaggagatctaaaaatgctcaccctgtactctaggctgcttaggaaatgtgaaaactagtaacatttataatggcattagctcctttcaatacaagacaacattttanaaaccttgaacttcaactcgcaacaccaaaagggctcaacagtcctgctttccccattgcactttatgaaacaggttgcagggactaggaaaagggccacattattaaaattactaactgtacagaaattgatttaaaaaagtcacagctcaaaattgctctttgtaaaagtcacacacatttccaagtatcaagtcgcagtcctgcttgtttacttggattttcttcgcttggattgcaccgcactggttatg

SEQ ID NO: 909 - DNA, 259 bp, Homo sapiens
tatacgactcactatagggcgaattgggccctctagatgcatgctcgagataaaaccatcaagctatggaataccctgggtgtgtgcaaatacactgtccaggatgagagccactcagagtgggtgtcttgtgtccgcttctcgcccaacagcagcaaccctatcatcgtctcctgtggctgggacaagctggtcaaggtatggaacctggctaactgcaagctgaagaccaaccacattggccacacaggctatctga

SEQ ID NO: 910 - DNA, 663 bp, Homo sapiens
cttttttttttttttttactttgacaacaaattatattttaaatgtttcatatttacttttatatttccatacaatcagaaacagtaaaaaaaatttggagagcacataaaaacatcttaaagttaaaaatataaagccttgtatttaaaaatgcagtcatttaaataatattataagaatctatttgtacataataaacaagtttcaaccagcaagaaattactaatattgactgtggagttttggctgttttaatagttctaactcattattccgtaattcaacacagcactaccaacacagctggcaatgacaagactgggagtatcaaactaggattgttagttcaattaaaatttcagataaacaataatgtacttatactaaaaaattatttgttgtatatctgaaatgaaaatttaactgggtacccaattgtttgtttgtttaatctaaaaaccctgattgaaatttatctaataaaacatcatttaatatctaaaataaaataaatttactataacatctttataactattcaatcaatgattcatcttctatttttccaaattcttgcacaaatatttgatgcttaaataaatacataaataataaataggttaataagttacacttgaaaataatttatgttatgatgaaaa

SEQ ID NO: 911 - DNA, 583 bp, Homo sapiens
  misc_feature 44, 126, 141, 149, 163, 293, 385, 456, 496, 509, 518: n = A,T,C or G
cttttttttttttttttttttttcagtttttcagattttactgnggaagcatatttaatgcacacatttgaatgttacacataaataattttaacgatggagtccaagttctggattttacattanatctgcatatataanacacttgnggtcaaatttcaanattggtaaagccagtttcaagctgcttatattttgagtacaggtttcactattacaaatatatgatgttaaactaacaaactcatgaccttcaaagatgtcttcgtcccacgcacacacatttgtaattngggtccatttgctatttcccttcttctataatcttcaaattatatagttatgcattgagttccctatgcatctcacccatctcctttatctnagccttctcatactttgccattctcttctttctggaaataaccagcacaacaattccagcaacaactgctntcaccacaaccacaataacagcaataacaccagcttttanaccctgcattganaattcaggngctttttcatcaacataataaattaaagtttgaccaggatccgagctcggtaccaagcttggcgt

SEQ ID NO: 912 - DNA, 536 bp, Homo sapiens
  misc_feature 431, 435, 438: n = A,T,C or G
gccaactcacacaaggcaggtgagtgaggaaatccagagttgccatggagaaaaatccagtgtcagcattcttgctccttgtggccctctcctacactctggccagagataccacagtcaaacctggagccaaaaaggacacaaaggactctcgacccaaactgccccagaccctctccagaggttggggtgaccaactcatctggactcagacatatgaagaagctctatataaatccaagacaagcaacaaacccttgatgattattcatcacttggatgagtgcccacacagtcaagctttaaagaaagtgtttgctgaaaataaagaaatccagaaattggcagagcagtttgtcctcctcaatctggtttatgaaacaactgacaaacacctttctcctgatggccagtatgtccccaggattatntttnttnacccatctctgacagttagagccgatatcactggaagatattcaaaccgtctctatgcttacgaacctgcagatacagctctgttgcttgacaacatg

SEQ ID NO: 913 - DNA, 548 bp, Homo sapiens; identical to SEQ ID NO: 855

SEQ ID NO: 914 - DNA, 237 bp, Homo sapiens; identical to SEQ ID NO: 409

SEQ ID NO: 915 - DNA, 529 bp, Homo sapiens; identical to SEQ ID NO: 407

SEQ ID NO: 916 - DNA, 571 bp, Homo sapiens
  misc_feature 9: n = A,T,C or G
gccctctanatgcatgctcgagtggtattatgaggcctcaggtgccttggggtacattgtcatgctataagggatgtatatcataaggtatggtggaagaggggccttatgtgaatgattgccacatactgtttctgttgctgctttttttccgattcctttttgtcattggatttgtttgttttgtcatgtggtgaatggtgttttagttattgtgttgctgccagaatcagaatccagttcttgttcttactgccttatagttattgtgttgccaccagaatcagaatccagttcttgttcatactgccttgtagtgagggcagtttaatatctacaaagaagcttttagaagctgaaaaagtcaatgtgattgtgcattctgcttttaagaagctgtttcagctatgaactgtgtatgtgctataagtgtgaggtaccataagttatttaatttttaaaagaggaaactcctgagtgagctgtttaagaaatctgagtgtgatctattgttacgttatttataactaggtaaaatgtctgtcgtgatagatttcttttaacgttcaga

SEQ ID NO: 917 - DNA, 416 bp, Homo sapiens
  misc_feature 80, 235: n = A,T,C or G
cttttttttttttttttttagtgaagaagaaaatcctttattttttgatgagcaaaaataataaattgctgttcacactnggataagaccatatcaaaagtgacagtaaacatgtacactgttggtgttatatggggatggggttctcggtaattttgtttattatttatgtttattattatgttttatcattaattattcaataaatttttatttaaaaagtcaccctacttanaaatcttctgtgggggtgggagggacaaaagattacaaaccaaaactcaggagatggtaacactggaattgataaaatcacctgggattagttgtataactctgaaccaccaaacctctgctatcaagccttgctacagtcatggctgtccagaaagatttacagttatttttctgagaaa

SEQ ID NO: 918 - DNA, 525 bp, Homo sapiens
cgactcactatagggcgaattgggccctctacatgcatgctcgagcctctgagaaaatcagaaaggcaaagccatagaggaaaactgcttcaaggccagaattttgggtaaggtaaagaaaaagctgtacatgaaagcaggggactgtttggaaaagaatcagaatctcaagatctatttttcttaaatgggaaagctctgaaacccagatctccgttctaccatcatcctgatcctttagttatggggcaataaactcaagtgcaatgagtaaagtgccagccatggatacaaaaacaaaaaataaaacaaaacaaccaaccaaaataactctggtcttagggtaatagaagacatacaggaaaggactgtttatagaacacctgaggttctcaagaaattactattcaatggttctgtttttgcttacattaaaaatcagactgaagattcaaagatcttaactattaaaggatgaaaggaatttgacagtgctttgaacagtgataaaatgtcgacgcggcc

SEQ ID NO: 919 - DNA, 525 bp, Homo sapiens; identical to SEQ ID NO: 756

SEQ ID NO: 920 - DNA, 540 bp, Homo sapiens; identical to SEQ ID NO: 447

SEQ ID NO: 921 - DNA, 108 bp, Homo sapiens
  misc_feature 11: n = A,T,C or G
gggccctctanatgcatgctcgagataaaaccatcaagctatggaataccctgggtgtgtgcaaatacactgtccaggatgagagccactcagagtgggtgtcttgtg

SEQ ID NO: 922 - DNA, 248 bp, Homo sapiens; identical to SEQ ID NO: 432

SEQ ID NO: 923 - DNA, 632 bp, Homo sapiens
  misc_feature 34: n = A,T,C or G
tacgactcactatagggcgaattgggccctctanatgcatgctcgagtcggccagctggatctcccacaaggtttccttgttaaaagggtgcttaagtaacctggccggcagcacgacttatgatgaagcacgaagaagccaggttctgtgtcgatcactctctcagtcccctcaactgctcatcttaaactatttggttcctgacacgtttccaaaaggggaaaggggaaaaggggaaggggggaaggggaacataaaaagtatttgttacatttaaaaagggggggaaggggaaagagctgtatctatgttcacctcattcaacttccttgagttatggcactatgatgttgcttaattaggtaagacatggatatttgcaccgagtgcaaatactgttcataacaaggtcatagctagaaagacagatgggctcaagtgtggacaaataatgtcatcaaggtaatagatcaaaaatattaaagccctataaaagatctgagcagtcaactccaaaacatccacatgacaaagtccttaaaatacaaatctcattactcttactcatgcaactgctaaaaaatagtgtgcagatatgtatttatatttgccttaaccttcaaatctaggg

SEQ ID NO: 924 - DNA, 548 bp, Homo sapiens; identical to SEQ ID NO: 855

SEQ ID NO: 925 - DNA, 529 bp, Homo sapiens; identical to SEQ ID NO: 407

SEQ ID NO: 926 - DNA, 536 bp, Homo sapiens
  misc_feature 473: n = A,T,C or G
gccaactcacacaaggcaggtgagtgaggaaatccagagttgccatggagaaaaatccagtgtcagcattcttgctccttgtggccctctcctacactctggccagagataccacagtcaaacctggagccaaaaaggacacaaaggactctcgacccaaactgccccagaccctctccagaggttggggtgaccaactcatctggactcagacatatgaagaagctctatataaatccaagacaagcaacaaacccttgatgattattcatcacttggatgagtgcccacacagtcaagctttaaagaaagtgtttgctgaaaataaagaaatccagaaattggcagagcagtttgtcctcctcaatctggtttatgaaacaactgacaaacacctttctcctgatggccagtatgtccccaggattatgtttgttgacccatctctgacagttagagccgatatcactggnagatattcaaaccgtctctatgcttacgaacctgcagatacagctctgttgcttgacaacatg

SEQ ID NO: 927 - DNA, 540 bp, Homo sapiens
  misc_feature 539: n = A,T,C or G
gccaactcacacaaggcaggtgagtgaggaaatccagagttgccatggagaaaaatccagtgtcagcattcttgctccttgtggccctctcctacactctggccagagataccacagtcaaacctggagccaaaaaggacacaaaggactctcgacccaaactgccccagaccctctccagaggttggggtgaccaactcatctggactcagacatatgaagaagctctatataaatccaagacaagcaacaaacccttgatgattattcatcacttggatgagtgcccacacagtcaagctttaaagaaagtgtttgctgaaaataaagaaatccagaaattggcagagcagtttgtcctcctcaatctggtttatgaaacaactgacaaacacctttctcctgatggccagtatgtccccaggattatgtttgttgacccatctctgacagttagagccgatatcactggaagatattcaaaccgtctctatgcttacgaacctgcagatacagctctgttgcttgacaacatgaana

SEQ ID NO: 928 - DNA, 487 bp, Homo sapiens
  misc_feature 448, 465, 474, 476: n = A,T,C or G
ctttttttttttttttttttttgatgaaatagataattcaggttgtcatttataattttagagtttgcttcacatatacaatgctgtgttacgaaacaatgaacacttttataaaaaatttatttcacacttttatacaaatatccacaggtaatttctaatcatgaaataattttacaatgctagttagtacaaaaatgtatcaaatgcaaacagaccagtgacttgacttgagatgacatttttaacaaccataaatctaaacaccataacatctttgtttctttgttgaaccaccctcccaacacccttttcaggacattcatcttttttttagtaacacaggtctaaaaacactgtcaaagtatcagctccttagcaatctagcaatctaaacacattagggacacaagttccccaagcaagaaactgagactttaaacactgntataacctgttttacanaaatttttngnaaacaaaatat

SEQ ID NO: 929 - DNA, 257 bp, Homo sapiens
  misc_feature 36: n = A,T,C or G
tacgactcactatagggcgaattgggccctctagcngcatgctcgagataaaaccatcaagctatggaataccctgggtgtgtgcaaatacactgtccaggatgagagccactcagagtgggtgtcttgtgtccgcttctcgcccaacagcagcaaccctatcatcgtctcctgtggctgggacaagctggtcaaggtatggaacctggctaactgcaagctgaagaccaaccacattggccacacaggctatctga

SEQ ID NO: 930 - DNA, 465 bp, Homo sapiens
  misc_feature 432, 435: n = A,T,C or G
gccaactcacacaaggcaggtgagtgaggaaatccagagttgccatggagaaaaatccagtgtcagcattcttgctccttgtggccctctcctacactctggccagagataccacagtcaaacctggagccaaaaaggacacaaaggactctcgacccaaactgccccagaccctctccagaggttggggtgaccaactcatctggactcagacatatgaagaagctctatataaatccaagacaagcaacaaacccttgatgattattcatcacttggatgagtgcccacacagtcaagctttaaagaaagtgtttgctgaaaataaagaaatccagaaattggcagagcagtttgtcctcctcaatctggtttatgaaacaactgacaaacacctttctcctgatggccagtatgtccccaggattatgnttnttgacccatctctgacagttagagccgata

SEQ ID NO: 931 - DNA, 291 bp, Homo sapiens
  misc_feature 24: n = A,T,C or G
tatagggcgaattgggccctctanatgcatgctcgagataaaaccatcaagctatggaataccctgggtgtgtgcaaatacactgtccaggatgagagccactcagagtgggtgtcttgtgtccgcttctcgcccaacagcagcaaccctatcatcgtctcctgtggctgggacaagctggtcaaggtatggaacctggctaactgcaagctgaagaccaaccacattggccacacaggctatctgaacacggtgactgtctctccagatggatccgagctcggtaccaag

SEQ ID NO: 932 - DNA, 644 bp, Homo sapiens
  misc_feature 12, 608: n = A,T,C or G
tgggccctctanatgcatgctcgagcggccgccctttttttttttttttttaagaaataagaaattaagaagctgtaacccctccttgcgctccagatactccattgctgtggggttgagagatggctggcaccacactcagattgcaaaggaaagagaaggataagctgattttgattgaaattccactgtaggcacatggaggaatttgaacatagcactgagccagtgaatactgtggctccctctggttgagacttggcactggctgcaaggccttgctggcagagggagctcatgcaggggacagccagatctgcagcaggttttgaaatgtggcctttcttcatccagaaatttccatgatggcgccaaacggcaggacttccagagagcctctgatggttgctccaggcagcctacgagtttcttccccagtgaggaagaccatgctcacttgcctcctctcttgcctcccctcaacttctcctgttctctgttatggcgtggccctgcccatgtgtcctgtctcctgccaccaccttcccctcggcgtccccaaggagtggtataagagcaacatgtactgccaagtagccttgccccanaggctcaggtctctgactgttgactagataagcatc

SEQ ID NO: 933 - DNA, 529 bp, Homo sapiens; identical to SEQ ID NO: 407

SEQ ID NO: 934 - DNA, 746 bp, Homo sapiens
tacgactcactatagggcgaattgggccctctagatgcatgctcgagcagttaccaaggaccactttactgcgatcaggattccaacgaccacctaatttcgtatctttcaactcttttcgaccggacctcttattcggaagcgttacaggaagacaggtctcaacttagggatcagatcacgttatcaacgctctgggatcgctgcaacctggcacttcaaggaagtgcaccgataacgtctagaccggcaaacacagatctagaggtggccaactgatcactgtaggagctgactggcaaagtcaaccaggcccaaccaagagtgaccaagacaacgattaggataacccacaggcactcctcgtcataaggccaacgacacagacaggctggcaaataaagggtttaatatttggttaaaaattgattttaaaaaacaagaaaaatatcctcaaaacatttacatttgatcactaatattaaagttcaaaatatcccccaaattacatttaattaaatgtttaaaattacaattccattaaatccattaatttaaaactacttttaataaaacaatacaacattagctacccattaacttttttaaaaagccacatcaaaataactcaaaactgtatttcaacaaacctgccagctgactcttgaggataaattctcaactataagacgattttctgttcttacaggtggagcatttcgtctatcattttcgaggtctgcgac

SEQ ID NO: 935 - DNA, 97 bp, Homo sapiens
tgatccagaggcctactttgttgatcccttaatcttggacttcccaccattgagaacagcgagaaataaatttctgttgtttataagctgccaagtt

SEQ ID NO: 936 - DNA, 591 bp, Homo sapiens
  misc_feature 12, 134, 154, 161, 167, 189, 191, 204, 216, 244, 260, 316,383, 388, 439, 444, 449, 549, 551, 559: n = A,T,C or G
tgggccctctanatgcatgctcgagcggccgcgtcgacttttttttttttttttttttttttttttttgaagcttgttgctgctttattgaaacttcctccctgtcgcacacaaagcaattacacaagggggtnttgccagggagcttttgcanagccttntccctntgtaccccccgacagtccccananaccctgcctccgnggcctccacctntgggtcagctccctggaggaccccgacncacagggaagcaggcncaggagggctgttggggccaaacctccccagctgccacaaccgccatgaccccagnggcagggtcagtgcccacaagggggttgcctgctttgactgaactaacctgtgggtttagtccaacnaacanatgtgcctgatttcagggctgaatttttgcttgaccacaagcctcgggcanaacanattcncctatgactgaatcgactgaatggatggccagcgacagcctggcctgggaatggactggcagctcatcactaaaatgactcctttcatggaatccactgntntgcagccncactgaccacagagcaactgaataggtgagca

SEQ ID NO: 937 - DNA, 584 bp, Homo sapiens
  misc_feature 8, 32: n = A,T,C or G
gactcacntatagggcgaattgggccctctanatgcatgctcgagcggccgccctttttttttttttttttacactcagattgtttatttaaaaatgcccaaaacacaaaaatagacttttaaggtaataatatatattactaaatatattatagtctacttataataattatatcgtcgttttcaatattacaaaaaaaggaagaaaaatacaagggaagcagacgacccaatatatataaatactataaaatcatattagaataaataaagtcgtcataaataaagggcccattgatttatgggtggggtttggcaacggctttggctacttgcttttggagggtaatttgagcaccaggattccccctcaggagaggttccagttaccaggagacactggaacctcaggtctataaaaactggaggggcagtgaaggcctattattcacagcacataagattctaggagacagatttgggcagggaagaggtgggggagagggttcattgcctcccttaaatatgctacaattttttttcccccaagaacctcggaagacactccatcccccaccatcatg

SEQ ID NO: 938 - DNA, 248 bp, Homo sapiens; identical to SEQ ID NO: 432

SEQ ID NO: 939 - DNA, 547 bp, Homo sapiens
gccaactcacacaaggcaggtgagtgaggaaatccagagttgccatggagaaaaatccagtgtcagcattcttgctccttgtggccctctcctacactctggccagagataccacagtcaaacctggagccaaaaaggacacaaaggactctcgacccaaactgccccagaccctctccagaggttggggtgaccaactcatctggactcagacatatgaagaagctctatataaatccaagacaagcaacaaacccttgatgattattcatcacttggatgagtgcccacacagtcaagctttaaagaaagtgtttgctgaaaataaagaaatccagaaattggcagagcagtttgtcctcctcaatctggtttatgaaacaactgacaaacacctttctcctgatggccagtatgtccccaggattatgtttgttgacccatctctgacagttagagccgatatcactggaagatattcaaaccgtctctatgcttacgaacctgcagatacagctctgttgcttgacaacatgaagaagctctc

SEQ ID NO: 940 - DNA, 346 bp, Homo sapiens
gccaactcacacaaggcaggtgagtgaggaaatccagagttgccatggagaaaaatccagtgtcagcattcttgctccttgtggccctctcctacactctggccagagataccacagtcaaacctggagccaaaaaggacacaaaggactctcgacccaaactgccccagaccctctccagaggttggggtgaccaactcatctggactcagacatatgaagaagctctatataaatccaagacaagcaacaaacccttgatgattattcatcacttggatgagtgcccacacagtcaagctttaaagaaagtgtttgctgaaaataaagaaatccagaaattggc

SEQ ID NO: 941 - DNA, 584 bp, Homo sapiens
  misc_feature 202, 239, 267, 515: n = A,T,C or G
cttttttttttttttttttttttatagatacaattggcttttatttgtgattcatgagtcagggcagtttccattctgcaaaatatagtgatagctcctactgggcaatacaacagtagaacagtgggttttgtaaaatgggaatccaggaacagaagaatataaataaattgatttaaataaactgattggttaatttcanaatacttcatattacttttttctaagagttaaagcanaaaggactttcttactgtgctgactcanacagcctggactctcatgtttttaggaaaattttgtctgttctgggatctacctgcttcctcatgtttcagtgtgagtatatggcatttagcatgactggctccattctggagtcaccaggctgtcacctaaatgagagtttgactaaacataaggcattaacactactgtcagttaccatcattttggacttccatcattcataggttatgatgtcctcctaatcatacatttatttgagtttttgncattccagccaaagagagaatatttgacatttgacgaatggctgcatgcaaacatttaaaggttttaga

SEQ ID NO: 942 - DNA, 525 bp, Homo sapiens; identical to SEQ ID NO: 756

SEQ ID NO: 943 - DNA, 525 bp, Homo sapiens
  misc_feature 2, 32: n = A,T,C or G
cnactcactatagggcgaattgggccctctanatgcatgctcgagcggccgcgtcgacggaggaaccacctacttgttgcagattattcactatttttattttttcccccatgtatattaacttctgggttctggccttcaatggataaacaaacaaacaaaccctagacttagggccagggaaactgtccctgttcattttatttcttacacagccaaataaacttcttccctgaggctgagaatgttaaaacatgtgataatagagacagtcactccacatattgccgttctttttgaagatgctataaaattctaaaatcttctctgtggatctgtcattcaagaaagccttaactggggattcaaattatacctctgtgttaaacatctgttcctttagttattttccacaatagtgcctttttaaataattatttgatgctctaaatatactgttaaatattatgcaagcattttagattttgtttgggggacataaagaggattgaaatgattttaata

SEQ ID NO: 944 - DNA, 484 bp, Homo sapiens
  misc_feature 466, 473: n = A,T,C or G
ctttttttttttttttgcactgactggtttcaatacagcactgaatttaactcatctttgggcttcaatctttacatagagtgaatatgaaaatgccatactgaggccttccccaacttaaaccatagtaaagatttcaaaatcattccagtatggtctgaatggtaactgttctggctgacacatctttttttttttttttttttttaaaaagacatttcctggccaatttttttgcttgaagatgattgtctggttatacaagacatcaatctgaaggtaacaacttattttaacttaactactggcataaccattgccagcagtgaacttgcactagtccaagccaactcaaaaacacacattataaacatttgaatgtcatttttaaaagcgatgtcacagtttgtttcctaaaaaatttaaaagcttttatttgaaaacgtatcttcagtttaaccctcanagttaanaaatatttttt

SEQ ID NO: 945 - DNA, 583 bp, Homo sapiens
  misc_feature 37: n = A,T,C or G
gtatacgactcactatagggcgaattgggccctctanatgcatgctcgaggagccacttttttgttttttaatcagctgctgcatttcctctctcccgtatctttgggctctcaggactaactaggtttgccagcttctctcttatcactgcttttaacctgcctaggaggtgtggaaagagacacagtaagtaaagtaaccagagcttggctcattctcctataaaaaaggccgaagttgaaatactgtccccttaagcttcagaggtgcaagatgggaataattattgcacactactacatcttataaatttatgagataatggaacataaaggacctggcaaagcagtaaatgtcagctaatattatttctgctgctactatagatttaacaccattcaaggtgctatggagatgtgaggccatttaatataagccagcagtccaaaaaggtgacaaaggctcctattccacatgtggaacttaggccacattaactccccagttaaggtaaatctggaattcatcagcctggcatatccaagcccacttatccatgttaaggcctggatccgagctcgg

SEQ ID NO: 946 - DNA, 601 bp, Homo sapiens
ctttttttttttttttttttaaaaatataaagccttgtatttaaaaatgcagtcatttaaataatattataagaatctatttgtacataataaacaagtttcaaccagcaagaaattactaatattgactgtggagttttggctgttttaatagttctaactcattattccgtaattcaacacagcactaccaacacagctggcaatgacaagactgggagtatcaaactaggattgttagttcaattaaaatttcagataaacaataatgtacttatactaaaaaattatttgttgtttatctgaaatgaaaatttaactgggtacccaattgtttgtttgtttaatctaaaaaccctgattgaaatttatctaataaaacatcatttaatatctaaaataaaataaatttactataacatctttataactattcaatcaatgattcatcttctatttttccaaattcttgcacaaatatttgatgcttaaataaatacataaataataaataggttaataagttacacttgaaaataatttatgttatgatgaaaaaacttaaagtgcttccacatgtcctcacaacatcactgtgagg

SEQ ID NO: 947 - DNA, 518 bp, Homo sapiens
ctatagggcgaattgggccctctacatgcatgctcgagcggccgcgtcgacggaggaaccacctacttgttgcagattattcactatttttattttttcccccatgtatattaacttctgggttctggccttcaatggataaacaaacaaacaaaccctagacttagggccagggaaactgtccctgttcattttatttcttacacagccaaataaacttcttccctgaggctgagaatgttaaaacatgtgataatagagacagtcactccacatattgccgttctttttgaagatgctataaaattctaaaatcttctctgtggatctgtcattcaagaaagccttaactggggattcaaattatacctctgtgttaaacatctgttcctttagttattttccacaatagtgcctttttaaataattatttgatgctctaaatatactgttaaatattatgcaagcattttagattttgtttgggggacataaagaggattgaaatgattttaata

SEQ ID NO: 948 - DNA, 693 bp, Homo sapiens
  misc_feature 6: n = A,T,C or G
tatacnactcactatagggcgaattgggccctctagatgcatgctcgaggcatcgtagctcggcttgtccagaagtgcttaccccccgagatcatcatggaatatggtgaggaagtattagaagaaataaaaaattcgaagcataacacaccaagaaaaaaacaaaccccagcagaatcaggatagctttgggaaatgaagcaagcacagtgcaagaggaagaacaagatagaaagggtagccatactgatttggaaagcattaatgaaaatttagttgaaagtgcattgagaagagtaaacagagaagaaaaaggtaataagtcagtccatctgaggaaagccagttcaccaaatcttcatagacgacagtgggagaaaaatgtacccaatacagctcttacagctttggaaaatgcatccatactcacctccagtttaacagcagaggacgatagaggtggttctgtaataaagtacagcaaaaatactactcgtaagcagtggctcaaagagacccctgacactttgttgaacatccttaagaatgctgatctcagcttggcttttcaaacatacacaatatatagaccaggttcagaagggttcttgaaaggccccctgtctgaagaaacagaagcatcggacagtgttgatggaggtcacgattctgtcattttggatccgagctcgg

SEQ ID NO: 949 - DNA, 191 bp, Homo sapiens
  misc_feature 181: n = A,T,C or G
ccgctcgcgatctagacaaatcacaaaacctggacatccctcaaggggcgaagaggcggccgggagactgcagaagtggctccttttcataaactcccctaaaccacacacaggagagagcgacgggcctcggccctttgatgatagcacatggcgcaggacccttgtcctggtggcacangggatgggga

SEQ ID NO: 950 - DNA, 592 bp, Homo sapiens
  misc_feature 76, 99, 155, 166, 170, 229, 236, 273, 309, 328, 333, 411,413, 457, 485, 536, 574, 575: n = A,T,C or G
agggcgattgggccctctagatgcatgctcgagcggccgccctttttttttttttttttttttttttttttttttnaaaaaatgtttattttttcaaanaaaacggcaatagccaattggaaacctacttattcttcaactccaattttgttttntttaaatttanaagngacttactgatttactattttaaacaaaccccccctttcccctttaaatgtttaccatntactcgngctgaatccttccaaggggattgctccagcgtttatntccaggtcctcgctttgctccttttaccaaaaaacncaaaacacaattccatcgngcatnttaagggctccaatcgtcaaaaataggaaaaaaaaaaatctttggaatagccaattaagttgaataaaaaaatccacncnaatgcggtttggttggggcaggaatccactcctatgttcctggnaatctgatcccgctccatgaatcctggnaattcatcctccctatcctatccacattatgatttgaatccaatgatccanctccaaggattgggatccgagctcggtaccaagcttgnngtaatcatgggcatagc

SEQ ID NO: 951 - DNA, 627 bp, Homo sapiens
tgggccctctagatgcatgctcgagcggccgcccttttttttttttttttactttgacaacaaattatattttaaatgtttcatatttacttttatatttccatacaatcagaaacagtaaaaaaaatttggagagcacataaaaacatcttaaagttaaaaatataaagccttgtatttaaaaatgcagtcatttaaataatattataagaatctatttgtacataataaacaagtttcaaccagcaagaaattactaatattgactgtggagttttggctgttttaatagttctaactcattattccgtaattcaacacagcactaccaacacagctggcaatgacaagactgggagtatcaaactaggattgttagttcaattaaaatttcagataaacaataatgtacttatactaaaaaattatttgttgtatatctgaaatgaaaatttaactgggtacccaattgtttgtttgtttaatctaaaaaccctgattgaattttatctaataaaacatcatttaatatctaaaataaaataaatttactataacatctttataactattcaatcaatgattcatcttctatttttccaaattcttgcacaaatatttgatgct

SEQ ID NO: 952 - DNA, 366 bp, Homo sapiens
  misc_feature 10, 50, 58: n = A,T,C or G
tctagatgcntgctcgagcggccgcgtcgactttttttttttttttttanagctaatnggcttttatttgtgatttatgaattaaagcagcaccactctacaagtacagtgatagctccccctgggcaatacaatacaagaacagtgggttttgtcaaattggaacaaggaaacagaaccacagaaataaatacattggttaacatcagattagttcaggttacttttttgtaaaagttaaagtagaggggacttctgtattatgctaactcaagtagactggaatctcctgtgttctttttttttttaaattggttttaattttttttaattggatctatcttcttccttacatttcagttggag

SEQ ID NO: 953 - DNA, 622 bp, Homo sapiens
  misc_feature 588: n = A,T,C or G
tgggccctctagatgcatgctcgagcgcatgggccccgccatgggcccggcccttggcgctggcattgagcgcatgggcctggccatgggtggcggtggcggtgccagctttgaccgtgccatcgagatggagcgtggcaacttcggaggaagcttcgcaggttcctttggtggagctggaggccatgctcctggggtggccaggaaggcctgccagatatttgtgagaaatctgccattcgatttcacatggaagatgctaaaggacaaattcaacgagtgcggccacgtgctgtacgccgacatcaagatggagaatgggaagtccaaggggtgtggtgtggttaagttcgagtcgccagaggtggccgagagagcctgccggatgatgaatggcatgaagctgagtggccgagagattgacgttcgaattgatagaaacgcttaagcagttgccttttttaaacatcgatacgagacctctgaatttgtattttttcttgttaaccattttaatttgttggctggatgtataaagatgtttaaaaaattcagttgctttttggggtaatttgaattacttttttnatgactggggttccatttgactgtttgcattgag

SEQ ID NO: 954 - DNA, 556 bp, Homo sapiens
  misc_feature 12, 125: n = A,T,C or G
tgggccctctanatgcatgctcgagtgcaagctggaggcagactgagtcctcggatgcttcggccagttctgactctagaggacaatacatacctctcatcaaagtagccagaacggattttacntggcatctagatccgtggtgtgcttcattgtccgggggtcatatccattgtgtcgctcttggatcacagggtcaaacaggtcagcaaatacctcataggtctcctcatctccagccaccatgcccacagtcttgatgaaggggtggccagggttgtccacgccagtctggatacactgatctagcgtccaaccagtgggtgtggtcttgtcgcagagccgtgcatagactgctggggtcaggtgactggccatgcagttgttgtgctttcggaggtctgggtactcagcgctcgggggatacagcctccgtcgttcactggcagctcgtacaggttccggtcggagcagaaacccagcggctagagaccccgctccggccaaagccaggagcctgagtcccgggcgggcggacagcagacgggagaaggga

SEQ ID NO: 955 - DNA, 643 bp, Homo sapiens
tgggccctctagatgcatgctcgagcggccgcccttttttttttttttttactttgacaacaaattatattttaaatgtttcatatttacttttatatttccatacaatcagaaacagtaaaaaaaatttggagagcacataaaaacatcttaaagttaaaaatataaagccttgtatttaaaaatgcagtcatttaaataatattataagaatctatttgtacataataaacaagtttcaaccagcaagaaattactaatattgactgtggagttttggctgttttaatagttctaactcattattccgtaattcaacacagcactaccaacacagctggcaatgacaagactgggagtatcaaactaggattgttagttcaattaaaatttcagataaacaataatgtacttatactaaaaaattatttgttgtatatctgaaatgaaaatttaactgggtacccaattgtttgtttgtttaatctaaaaaccctgattgaaatttatctaataaaacatcatttaatatctaaaataaaataaatttactataacatctttataactattcaatcaatgattcatcttctatttttccaaattcttgcacaaatatttgatgcttaaataaatacataaa

SEQ ID NO: 956 - DNA, 131 bp, Homo sapiens
gtcgactattaaaaaaagacaatcatagaagtaagacttctcttaattccaaagtcaaaactgtgtaagaagttgaattaagagaagtcttacttctaaaaaccaaaaataaacttaatattcagacatgt

SEQ ID NO: 957 - DNA, 539 bp, Homo sapiens
gccaactcacacaaggcaggtgagtgaggaaatccagagttgccatggagaaaaatccagtgtcagcattcttgctccttgtggccctctcctacactctggccagagataccacagtcaaacctggagccaaaaaggacacaaaggactctcgacccaaactgccccagaccctctccagaggttggggtgaccaactcatctggactcagacatatgaagaagctctatataaatccaagacaagcaacaaacccttgatgattattcatcacttggatgagtgcccacacagtcaagctttaaagaaagtgtttgctgaaaataaagaaatccagaaattggcagagcagtttgtcctcctcaatctggtttatgaaacaactgacaaacacctttctcctgatggccagtatgtccccaggattatgtttgttgacccatctctgacagttagagccgatatcactggaagatattcaaaccgtctctatgcttacgaacctgcagatacagctctgttgcttgacaacatgaag

SEQ ID NO: 958 - DNA, 720 bp, Homo sapiens
  misc_feature 7: n = A,T,C or G
gtatacnactcactatagggcgaattgggccctctagatgcatgctcgagtcggccagctggatctcccacaaggtttccttgttaaaagggtgcttaagtaacctggccggcagcacgacttatgatgaagcacgaagaagccaggttctgtgtcgatcactctctcagtcccctcaactgctcatcttaaactatttggttcctgacacgtttccaaaaggggaaaggggaaaaggggaaggggggaaggggaacataaaaagtatttgttacatttaaaaagggggggaaggggaaagagctgtatctatgttcacctcattcaacttccttgagttatggcactatgatgttgcttaattaggtaagacatggatatttgcaccgagtgcaaatactgttcataacaaggtcatagctagaaagacagatgggctcaagtgtggacaaataatgtcatcaaggtaatagatcaaaaatattaaagccctataaaagatctgagcagtcaactccaaaacatccacatgacaaagtccttaaaatacaaatctcattactcttactcatgcaactgctaaaaaatagtgtgcagatatgtatttatatttgccttaaccttcaaaatctagggacataaatcttgtctttgttaaaaaaaaataaaaaataaaaatagacaggaatttgctacacttttccctccacgaacagcagc

SEQ ID NO: 959 - DNA, 765 bp, Homo sapiens
  misc_feature 4, 34, 758: n = A,T,C or G
tacnactcactatagggcgaattgggccctctanatgcatgctcgagcagttaccaaggaccactttactgcgatcaggattccaacgaccacctaatttcgtatctttcaactcttttcgaccggacctcttattcggaagcgttacaggaagacaggtctcaacttagggatcagatcacgttatcaacgctctgggatcgctgcaacctggcacttcaaggaagtgcaccgataacgtctagaccggcaaacacagatctagaggtggccaactgatcactgtaggagctgactggcaaagtcaaccaggcccaaccaagagtgaccaagacaacgattaggataacccacaggcactcctcgtcataaggccaacgacacagacaggctggcaaataaagggtttaatatttggttaaaaattgattttaaaaaacaagaaaaatatcctcaaaacatttacatttgatcactaatattaaagttcaaaatatcccccaaattacatttaattaaatgtttaaaattacaattccattaaatccattaatttaaaactacttttaataaaacaatacaacattagctacccattaacttttttaaaaagccacatcaaaataactcaaaactgtatttcaacaaacctgccagctgactcttgaggataaattctcaactataagacgattttctgttcttacaggtggagcatttcgtctatcattttcgaggtctgcgactactaaaacggntcagagt

SEQ ID NO: 960 - DNA, 256 bp, Homo sapiens
tgggccctctagatgcatgctcgagaaaatcaagtaactatcatttggagtgtctttgtaaaatgcaacacttgttcttttacaaaagctaagcatcttttgttaagctagttaactccccagcttataaaataggacaacgaggtggccaggaaagtaagacaaattcaaacatcagctggataatttatattttaaatatatgtatagtcaatattgtgaaatctctaactctacataaaatacttcagatgac

SEQ ID NO: 961 - DNA, 590 bp, Homo sapiens
  misc_feature 16, 235, 419, 434, 526: n = A,T,C or G
gaattgggccctctanatgcatgctcgagcggccgcccttttttttttttttttttttttggctctagagggggtagagggggtgctatagggtaaatacgggccctatttcaaagatttttaggggaattaattctaggacgatgggcatgaaactgtggtttgctccacagatttcagagcattgaccgtagtatacccccggtcgtgtagcggtgaaagtggtttggtttanacgtccgggaattgcatctgtttttaagcctaatgtggggacagctcatgagtgcaagacgtcttgtgatgtaattattatacgaatgggggcttcaatcgggagtactactcgattgtcaacgtcaaggagtcgcaggtcgcctggttctaggaataatgggggaagtatgtaggagttgaanattagtccgccgtantcggtgtactcgtaggttcagtaccattggtggccaattgatttgatggtaagggagggatcgttgacctcgtctgttatgtaaaggatgcntagggatgggagggcgatgaggactaggatgatggcgggcaggatagttcaaacggtttctatt

SEQ ID NO: 962 - DNA, 147 bp, Homo sapiens
  misc_feature 11: n = A,T,C or G
gccctctagangcatgctcgagcggccgcgacgcccgccgcagctggggcgatccacgggacgggcccggctcgcgtccagagtcgccgccgccgccggcccccagggtgcccgggcccccctcgcgggggaccgtgcccccgccgc

SEQ ID NO: 963 - DNA, 526 bp, Homo sapiens
  misc_feature 431: n = A,T,C or G
gccaactcacacaaggcaggtgagtgaggaaatccagagttgccatggagaaaaatccagtgtcagcattcttgctccttgtggccctctcctacactctggccagagataccacagtcaaacctggagccaaaaaggacacaaaggactctcgacccaaactgccccagaccctctccagaggttggggtgaccaactcatctggactcagacatatgaagaagctctatataaatccaagacaagcaacaaacccttgatgattattcatcacttggatgagtgcccacacagtcaagctttaaagaaagtgtttgctgaaaataaagaaatccagaaattggcagagcagtttgtcctcctcaatctggtttatgaaacaactgacaaacacctttctcctgatggccagtatgtccccaggattatngtttgttgacccatctctgacagttagagccgatatcactggaagatattcaaaccgtctctatgcttacgaacctgcagatacagctctgttgc

SEQ ID NO: 964 - DNA, 237 bp, Homo sapiens
cactatagggcgaattgggccctctagatgcatgctcgagctttctccttcttatagacgttccggacgggcatgaccggtccggtcagctgggtggccagtttcagttcttcagcagaactgtctcccttcttgggggccgagggcttcctggggaagaggatgagtttggagcggtactccttcagccgctgcacgttggcctgcagggactccgtggacttgttccgcctcctc

SEQ ID NO: 965 - DNA, 697 bp, Homo sapiens
  misc_feature 666: n = A,T,C or G
tatagggcgaattgggccctctagatgcatgctcgaggattaaacgagatgatatatgcgaaggcagggatttttgtctgttgtgttcagcactgtactcccagtgcctggaacagtgcctggtacacagtaggtgttcagtaagtacctgtaggaagaatgctgaatgcatgaggggccagccagagcagaacttgtggatgaggttggtaagcagagacagaaagggtggtggggctggagcgtgctaaaggatggtcacctccaccaaaggcaggagctgccactagacctcaagcggtgggtgccatgtgggaatgtcagctcagaggtgccacatcttccaatattttatgacaaaaaggaagtctagagttttatgtgaatttaattaagatttgaatgttggaattaatttgattttaaaagcagggcaattagaactaataaattcagcaaagttgaaggatacaaaatgaacacacaaaaattggttacatttctacaactaacaataaacaatccaaaaaggaaattaagaaaataattccatttacaatagcatcaaaaagaataaagtaccgaggaataaacttaacaaaggttaaatattgtatgctaaaaactacaagatattggtgaaagaaattaaagatgacaccaatnaatggaaagacattccatgttcatggattag

SEQ ID NO: 966 - DNA, 538 bp, Homo sapiens
gccaactcacacaaggcaggtgagtgaggaaatccagagttgccatggagaaaaatccagtgtcagcattcttgctccttgtggccctctcctacactctggccagagataccacagtcaaacctggagccaaaaaggacacaaaggactctcgacccaaactgccccagaccctctccagaggttggggtgaccaactcatctggactcagacatatgaagaagctctatataaatccaagacaagcaacaaacccttgatgattattcatcacttggatgagtgcccacacagtcaagctttaaagaaagtgtttgctgaaaataaagaaatccagaaattggcagagcagtttgtcctcctcaatctggtttatgaaacaactgacaaacacctttctcctgatggccagtatgtccccaggattatgtttgttgacccatctctgacagttagagccgatatcactggaagatattcaaaccgtctctatgcttacgaacctgcagatacagctctgttgcttgacaacatgaa

SEQ ID NO: 967 - DNA, 566 bp, Homo sapiens
  misc_feature 243: n = A,T,C or G
gactcactatagggcgaattgggccctctacatgcatgctcgagcggccgccctttttttttttttttggctctagagggggtagagggggtgctatagggtaaatacgggccctatttcaaagatttttaggggaattaattctaggacgatgggcatgaaactgtggtttgctccacagatttcagagcattgaccgtagtatacccccggtcgtgtagcggtgaaagtggtttggtttanacgtccgggaattgcatctgtttttaagcctaatgtggggacagctcatgagtgcaagacgtcttgtgatgtaattattatacgaatgggggcttcaatcgggagtactactcgattgtcaacgtcaaggagtcgcaggtcgcctggttctaggaataatgggggaagtatgtaggagttgaagattagtccgccgtagtcggtgtactcgtaggttcagtaccattggtggccaatagatttgatggtaagggagggatcgttgacctcgtctgttatgtaaaggatgcgtagggatgggagggcgatgaggactaggatga

SEQ ID NO: 968 - DNA, 616 bp, Homo sapiens
gactcactatagggcgaattgggccctctagatgcatgctcgagcaccgtcattaccccgagcacctgcagccccaggaagtcctggccgtcctcgctcaccaggagcccctcttggacccatgggtccaggagctccattttcgcctggaagaccattttcaccctttaatccaggagcacctgtttcacccttttctccatttcgtccatcgaagcctctgtgtcctttcataccagggaatccaggtatcccagctggacctttgatacctggaggtccaggcaatcctcgctctccaggtcgtccgggtctacctgattctccatcttttccagcaggaccagatggacctatagcaccaggaggtcctggagggcctgaaggaccagcttgcccaggttcaccagggggtccttggtatcctggagatccaggggaaccaggatgaccagatgtaccagggggaccgggagggcctggggggccagctggtccaggatagcctgcgagtcctcctactgctactccagacttgacatcatatgaatcatactggggagaatagttctgaggaccagtagggcatgattcacagattccaggggggccagga

SEQ ID NO: 969 - DNA, 141 bp, Homo sapiens
  misc_feature 21, 22: n = A,T,C or G
tagggcgattgggccctctanngcatgctcgagcggccgcccttttttttttttttttttttttttttttttttttttttttttttttttttttttttttttttttttttttttttttttttttttttttttttttttttt

SEQ ID NO: 970 - DNA, 439 bp, Homo sapiens
ctcactatagggcgaattgggccctctacatgcatgctcgagtggcagatatactaacgcaacttttgcagacagatgactctgcagaatttaacctagtgaacaatgccctattaagtatatttaaaatggatgcaaaagggactttaggtgggttgttcagccaaatacttcaaggagaggacattgttagagaacgagcaattaaattcctttctacaaaacttaagactttaccagatgaagtcttaacaaaggaagtggaagagcttatactaactgaatccaaaaaggtcctagaagatgtgactggtgaagaatttgttctatttatgaagatactgtctgggttaaaaagcttacagacagtgagtggaagacagcaacttgtagagttggtggctgaacaggccgacctagaacagaccttcaatccctc

SEQ ID NO: 971 - DNA, 617 bp, Homo sapiens
  misc_feature 565: n = A,T,C or G
gccaactcacacaaggcaggtgagtgaggaaatccagagttgccatggagaaaaatccagtgtcagcattcttgctccttgtggccctctcctacactctggccagagataccacagtcaaacctggagccaaaaaggacacaaaggactctcgacccaaactgccccagaccctctccagaggttggggtgaccaactcatctggactcagacatatgaagaagctctatataaatccaagacaagcaacaaacccttgatgattattcatcacttggatgagtgcccacacagtcaagctttaaagaaagtgtttgctgaaaataaagaaatccagaaattggcagagcagtttgtcctcctcaatctggtttatgaaacaactgacaaacacctttctcctgatggccagtatgtccccaggattatgtttgttgacccatctctgacagttagagccgatatcactggaagatattcaaaccgtctctatgcttacgaacctgcagatacagctctgttgcttgacaacatgaagaaagctctcaagttgctgaagactgnattgtaaagaaaaaaatctccaagcccttctgtctgtcaggccttgagactt

SEQ ID NO: 972 - DNA, 648 bp, Homo sapiens
  misc_feature 567: n = A,T,C or G
cgactcactatagggcgaattgggccctctagatgcatgctcgaggagatggtgatggagtacaagaaggtccagttggctgtgtatatgtaatatacacaggattaacactaaatggaggttttggttgactagatatccctcttgaaggagaacttgaaggtggcgtggtggctgtgtacagtgagtgttgattccgtggagatggttgattactgatgggtgaaggactcctattaattgctgtcccaggtctttgagaaggttcaactgtaatttctatcttcttcatggaacctttggataaactagatgctgtgtatggaagataggctactgaatggcttccctgtttctgatagctaggaggtccttgttgatatggatggggtggagtagttgaaggactaggtggcataaagatgtggcccaactgggaaggttgcacttgatgctgtggagagctgaagggtgaaggacattgagaaggaggtggtgaatggtaagcagactgagggatctgctgctgtttgggagaatactgagaaggctgatagttctgttggntgtggataaacaggtaaaggacgctggctatagtgaggcactgggccctgtggtgaggactgccacggcgtactctgagga

SEQ ID NO: 973 - DNA, 635 bp, Homo sapiens
  misc_feature 6, 30: n = A,T,C or G
gactcntatagggcgaattgggccctctanatgcatgctcgagtggtattatgaggcctcaggtgccttggggtacattgtcatgctataagggatgtatatcataaggtatggtggaagaggggccttatgtgaatgattgccacatactgtttctgttgctgctttttttccgattcctttttgtcattggatttgtttgttttgtcatgtggtgaatggtgttttagttattgtgttgctgccagaatcagaatccagttcttgttcttactgccttatagttattgtgttgccaccagaatcagaatccagttcttgttcatactgccttgtagtgagggcagtttaatatctacaaagaagcttttagaagctgaaaaagtcaatgtgattgtgcattctgcttttaagaagctgtttcagctatgaactgtgtatgtgctataagtgtgaggtaccataagttatttaatttttaaaagaggaaactcctgagtgagctgtttaagaaatctgagtgtgatctattgttacgttatttataactaggtaaaatgtctgtcgtgatagatttcttttaacgttcagatactgtggttgggttgtctatatttaatatgcagatttgcctg

SEQ ID NO: 974 - DNA, 597 bp, Homo sapiens
ctatagggcgaattgggccctctagatgcatgctcgagcaccgtcattaccccgagcacctgcagccccaggaagtcctggccgtcctcgctcaccaggagcccctcttggacccatgggtccaggagctccattttcgcctggaagaccattttcaccctttaatccaggagcacctgtttcacccttttctccatttcgtccatcgaagcctctgtgtcctttcataccagggaatccaggtatcccagctggacctttgatacctggaggtccaggcaatcctcgctctccaggtcgtccgggtctacctgattctccatcttttccagcaggaccagatggacctatagcaccaggaggtcctggagggcctgaaggaccagcttgcccaggttcaccagggggtccttggtatcctggagatccaggggaaccaggatgaccagatgtaccagggggaccgggagggcctggggggccagctggtccaggatagcctgcgagtcctcctactgctactccagacttgacatcatatgaatcatactggggagaatagttctgaggaccagtagggcatgattcacagattcc

SEQ ID NO: 975 - DNA, 610 bp, Homo sapiens
  misc_feature 558: n = A,T,C or G
ctatagggcgaattgggccctctagatgcatgctcgagcaccgtcattaccccgagcacctgcagccccaggaagtcctggccgtcctcgctcaccaggagcccctcttggacccatgggtccaggagctccattttcgcctggaagaccattttcaccctttaatccaggagcacctgtttcacccttttctccatttcgtccatcgaagcctctgtgtcctttcataccagggaatccaggtatcccagctggacctttgatacctggaggtccaggcaatcctcgctctccaggtcgtccgggtctacctgattctccatcttttccagcaggaccagatggacctatagcaccaggaggtcctggagggcctgaaggaccagcttgcccaggttcaccagggggtccttggtatcctggagatccaggggaaccaggatgaccagatgtaccagggggaccgggagggcctggggggccagctggtccaggatagcctgcgagtcctcctactgctactccagacttgacatcatatgaatcatactggggagnatagttctgaggaccagtagggcatgattcacagattccaggggggccagga

SEQ ID NO: 976 - DNA, 681 bp, Homo sapiens
  misc_feature 2, 347, 401, 422, 650, 677: n = A,T,C or G
cnactaatatagggcgaattgggccctctacatgcatgctcgagcggccgccctttttttttttttttttttttttgcatattcttagatttttacatttttattttaaaacagagaatttcatattgattaacacctactactaaacagaatgatgcattaattaaatgccttgtcctaactgttataagctctgttagaaaaataaacatctcaccacaaactacagtgtcagctctttaataaatacataaaacagaagttagtagtcaatcagagttatatgaacaggttcatagtatattatgtgaaagtatcatattctccaatattctgtatcatttaanacaatttaagttacgtataattcaaagccagaaataataagaaatatgttcagngataatttgcttctttcttanagctattttatattcaaatatttaatttaaaaatatattctatattaaatttatttttacaaacgcagtattcgttaggtgaaacaaaataagtttttatgttactgataagtttaatacatttctaatttttttcagaagttcaagaaaccataatgaagtagctaatgtaaaatagtttaaaagctatgttaaatatacacaaaatgaatttctatattaatatgngcaaatgtatattttcttataatttanaatt

SEQ ID NO: 977 - DNA, 436 bp, Homo sapiens
  misc_feature 11, 12, 13, 213, 272, 286, 313, 326, 344, 353, 375, 378,412, 428, 435, 436: n = A,T,C or G
tgggccctctnnnatgcatgctcgagcggccgccctttttttttttttttttactttgacaacaaattatattttaaatgtttcatatttacttttatatttccatacaatcagaaacagtaaaaaaaatttggagagcacataaaaacatcttaaagttaaaaatataaagccttgtatttaaaaatgcagtcatttaaataatattataanaatctatttgtacataataaacaagtttcaaccagcaagaaattactaatattgactgnggagttttggctgntttaatagttctaactcattattccgnaattcaacacagnactaccaacacagctggnaatgacaanactgggagtatcaaactaggantgntagttcaattaaaatttcagataaacaataatgnacttatactaaaaaantatttgnn

SEQ ID NO: 978 - DNA, 664 bp, Homo sapiens
  misc_feature 11, 35, 297: n = A,T,C or G
tatacgactcntatagggcgaattgggccctctanatgcatgctcgagcggccgcccttttttttttttttttttttactttgacaacaaattatattttaaatgtttcatatttacttttatatttccatacaatcagaaacagtaaaaaaaatttggagagcacataaaaacatcttaaagttaaaaatataaagccttgtatttaaaaatgcagtcatttaaataatattataagaatctatttgtacataataaacaagtttcaaccagcaagaaattactaatattgactgnggagttttggctgttttaatagttctaactcattattccgtaattcaacacagcactaccaacacagctggcaatgacaagactgggagtatcaaactaggattgttagttcaattaaaatttcagataaacaataatgtacttatactaaaaaattatttgttgtttatctgaaatgaaaatttaactgggtacccaattgtttgtttgtttaatctaaaaaccctgattgaaatttatctaataaaacatcatttaatatctaaaataaaataaatttactataacatctttataactattcaatcaatgattcatcttctatttttccaaattcttgcacaaatatttgatgcttaaataaata

SEQ ID NO: 979 - DNA, 520 bp, Homo sapiens
gccaactcacacaaggcaggtgagtgaggaaatccagagttgccatggagaaaaatccagtgtcagcattcttgctccttgtggccctctcctacactctggccagagataccacagtcaaacctggagccaaaaaggacacaaaggactctcgacccaaactgccccagaccctctccagaggttggggtgaccaactcatctggactcagacatatgaagaagctctatataaatccaagacaagcaacaaacccttgatgattattcatcacttggatgagtgcccacacagtcaagctttaaagaaagtgtttgctgaaaataaagaaatccagaaattggcagagcagtttgtcctcctcaatctggtttatgaaacaactgacaaacacctttctcctgatggccagtatgtccccaggattattgtttgttgacccatctctgacagttagagccgatatcactggaagatattcaaaccgtctctatgcttacgaacctgcagatacagctc

SEQ ID NO: 980 - DNA, 638 bp, Homo sapiens
  misc_feature 10, 12: n = A,T,C or G
tatacgactnantatagggcgaattgggccctctacatgcatgctcgagtcggccagctggatctcccacaaggtttccttgttaaaagggtgcttaagtaacctggccggcagcacgacttatgatgaagcacgaagaagccaggttctgtgtcgatcactctctcagtcccctcaactgctcatcttaaactatttggttcctgacacgtttccaaaaggggaaaggggaaaaggggaaggggggaaggggaacataaaaagtatttgttacatttaaaaagggggggaaggggaaagagctgtatctatgttcacctcattcaacttccttgagttatggcactatgatgttgcttaattaggtaagacatggatatttgcaccgagtgcaaatactgttcataacaaggtcatagctagaaagacagatgggctcaagtgtggacaaataatgtcatcaaggtaatagatcaaaaatattaaagccctataaaagatctgagcagtcaactccaaaacatccacatgacaaagtccttaaaatacaaatctcattactcttactcatgcaactgctaaaaaatagtgtgcagatatgtatttatatttgccttaaccttcaaaatctagggaca

SEQ ID NO: 981 - DNA, 536 bp, Homo sapiens
gccaactcacacaaggcaggtgagtgaggaaatccagagttgccatggagaaaaatccagtgtcagcattcttgctccttgtggccctctcctacactctggccagagataccacagtcaaacctggagccaaaaaggacacaaaggactctcgacccaaactgccccagaccctctccagaggttggggtgaccaactcatctggactcagacatatgaagaagctctatataaatccaagacaagcaacaaacccttgatgattattcatcacttggatgagtgcccacacagtcaagctttaaagaaagtgtttgctgaaaataaagaaatccagaaattggcagagcagtttgtcctcctcaatctggtttatgaaacaactgacaaacacctttctcctgatggccagtatgtccccaggattatgtttgttgacccatctctgacagttagagccgatatcactggaagatattcaaaccgtctctatgcttacgaacctgcagatacagctctgttgcttgacaacatg

SEQ ID NO: 982 - DNA, 608 bp, Homo sapiens
  misc_feature 431, 575: n = A,T,C or G
gccaactcacacaaggcaggtgagtgaggaaatccagagttgccatggagaaaaatccagtgtcagcattcttgctccttgtggccctctcctacactctggccagagataccacagtcaaacctggagccaaaaaggacacaaaggactctcgacccaaactgccccagaccctctccagaggttggggtgaccaactcatctggactcagacatatgaagaagctctatataaatccaagacaagcaacaaacccttgatgattattcatcacttggatgagtgcccacacagtcaagctttaaagaaagtgtttgctgaaaataaagaaatccagaaattggcagagcagtttgtcctcctcaatctggtttatgaaacaactgacaaacacctttctcctgatggccagtatgtccccaggattatntttgttgacccatctctgacagttagagccgatatcactggaagatattcaaaccgtctctatgcttacgaacctgcagatacagctctgttgcttgacaacatgaagaaagctctcaagttgctgaagactgaattgtaaagnaaaaaaatctccaagcccttctgtctgtcaggc

SEQ ID NO: 983 - DNA, 553 bp, Homo sapiens
  misc_feature 6, 35: n = A,T,C or G
tatacnactcctatagggcgaattgggccctctanatgcatgctcgaggggtgtgttcctacttagctttgtacagcccagatgtgatatttctacaggaagttattcccccatattatagctacctaaagaagagatcaagtaattatgagattattacaggtcatgaagaaggatatttcacagctataatgttgaagaaatcaagagtgaaattaaaaagccaagagattattccttttccaagtaccaaaatgatgagaaaccttttatgtgtgcatgtgaatgtgtcaggaaatgagctttgccttatgacatcccatttggagagcaccagagggcatgctgcggaacgaatgaatcagttaaaaatggttttaaagaaaatgcaagaggctccagagtcagctacagttatatttgcaggagatacaaatctaagggatcgagaggttaccagatgtggtggtttacccaacaacattgtggatgtctgggagtttttgggcaaacctaaacattgccagtatacatgggatacacaaatgaactc

SEQ ID NO: 984 - DNA, 469 bp, Homo sapiens
  misc_feature 414, 431, 448: n = A,T,C or G
gccaactcacacaaggcaggtgagtgaggaaatccagagttgccatggagaaaaatccagtgtcagcattcttgctccttgtggccctctcctacactctggccagagataccacagtcaaacctggagccaaaaaggacacaaaggactctcgacccaaactgccccagaccctctccagaggttggggtgaccaactcatctggactcagacatatgaagaagctctatataaatccaagacaagcaacaaacccttgatgattattcatcacttggatgagtgcccacacagtcaagctttaaagaaagtgtttgctgaaaataaagaaatccagaaattggcagagcagtttgtcctcctcaatctggtttatgaaacaactgacaaacacctttctcctgatggccagnatgtccccaggattatngtttgttgacccatctntgacagttagagccgatatca

SEQ ID NO: 985 - DNA, 404 bp, Homo sapiens
  misc_feature 76, 105, 110, 173, 198, 203, 247, 273, 288, 301, 302, 332,336, 351, 362, 375, 377, 391: n = A,T,C or G
agggcgattgggccctctagatgcatgctcgagcggccgccctttttttttttttttttttttttttttttttttnggacaggaagtaaaatttattggtgagtnttaanaggggggcagcacattggaagccctcatgagtgcagggcccgccacttgtccaaagggccacnattggggatgtacttgaccccacanccatntgggatgagccgcttttcaaccaccatgttttcaaattcatcancattgaacttggtgaaaccccacttntttgaaatggggatnttctggcggccannaaacttgaacttggccctgcccagggcctnaatnacatgctccttgttntgcaacttggngcggatggacatnanaacttggccaatgngaaccctggccac

SEQ ID NO: 986 - DNA, 632 bp, Homo sapiens
  misc_feature 21, 458, 505, 595: n = A,T,C or G
tagggcgattgggccctctanatgcatgctcgagcggccgccctttttttttttttttgtcacacttgtttatttctttgggatgttgctgtgtgtcatggaagaaacgctcccctgaaaactgtaaccaaacaaagtttggttaaaacaaagttggttcctttgttttcatggaaatgtcagacaactatgaaaagctaaggaagcatgttgaactgaaggtctggctttggtaaattaggcagagatgttctcagcagcaaacaggtaaaatctgacatcgagaagcattattttaatgtaggaccagttataatcttaaagaactgactaggttctaaaataatagaactgagaaataggactgagaaatgaccaacatcaagtataatacggtacacttagcacttgtttctatagaaaacatttcaaatcaagttctttatgatgtgaaccanattttccaaatgcctaaaccacttctgagctttaagcaaggcctcanaaattcagcgggtgcctgggaggcttcattcacattcacctctaaggagaggctaaaagaggaatttccagatggcagctactggctcanaaccagggggtcccttgccaagtctgtctctatgtgg

SEQ ID NO: 987 - DNA, 98 bp, Homo sapiens
gcatgctcgagcggccgcgtcgacgtagagccgccgttggcttttacaccatccttgatgagagccagtgatgaggagctgacttactggaaacccaa

SEQ ID NO: 988 - DNA, 535 bp, Homo sapiens
  misc_feature 472, 498: n = A,T,C or G
tctagatgcatgctcgagcggccgcgtcgacgtggtgccaaggcaggcggtttctggtgtggttgctggagtcttcatgggaggcacacgaaggagtctgtgatatcatgtgagacccgggaagggccccttcaaccgcccctttctgaactgcgggtcaggcaggctcccctggggaaacctgggcgcgtaggaggcacctccacctgctggagctggcccaggctggcctcccctgcagacaggccgcgtctagggccagctgctcatcccagacgcacccaggtgattcccatgctgaacagtttgatctcctgccagagtgtcgggccacaaactgggcagcacatcaggatcacctgggggccttcaaaaatcaaaaatccacccccaggccatgccctggacccactgcaccaggacaagaaatccaccccaggcctctccccagacccactgcaccaggacaagnaaatccacccccaggccacgccccanacccactgccctaggatgtgggggtgggaaccaggtg

SEQ ID NO: 989 - DNA, 648 bp, Homo sapiens
  misc_feature 21, 22, 173, 453, 491, 563, 621: n = A,T,C or G
agggcgattgggccctctagnngcatgctcgagcggccgcccttttttttttttttttaattattcaaatttttttttaatttaaaaacaatacaagctgattatacatttgacaaatacaaggaatttctgactgcaggaaaaaacaaagcatcaactacaaagagaagcanaaattcttcttgagctgctgattttactatacatttgggctatattttttcttaagacaatcactacaaagtaataatataaataccttttttaatgtgaaaaggtataaaatctcctttaaaaacttttcacttatccatcatataacatcaaatgtacctgtaatcccaagtatgattcttttgagaaggaaaaaagtcagatcaaatacatcattaaggaaaaacatgcacactaaatagactatgaactctactgggacaaagaccattattttgngtattttttcattccccaattcctgacaggattctcanaatcgtttcttcatgaatagcaaattgacttattggttaaattagcaactacagagctgcctaacaacagtncaaaataaatgaataattcaccagaaactagctctagatactaattttaattactttncagcaacataatttggtcgacgcggcc

SEQ ID NO: 990 - DNA, 641 bp, Homo sapiens
  misc_feature 5, 362, 424, 427, 444, 449, 565, 567, 584, 602, 609, 611,624, 629: n = A,T,C or G
taacnactaactatagggcgaattgggccctctagatgcatgctcgagcggccgcagccatgtcccgggggcccgaggaggtgaaccggctcacggagagcacctaccggaatgttatggaacagttcaatcctgggctgcgaaatttaataaacctggggaaaaattatgagaaagctgtaaacgctatgatcctggcaggaaaagcctactacgatggagtggccaagatcggtgagattgccactgggtcccccgtgtcaactgaactgggacatgtcctcatagagatttcaagtacccacaagaaactcaacgagagtcttgatgaaaattttaaaaaattccacaaagagattatncatgagctggagaagaagatagaacttgacgtgaaatatatgaacgcaactcttaaaagatnccnaacagaacacaagaatnaattngagtctttggagaaatcccaagctgagttgaagaagatcagaaggaaaagcccaggaagccgaaacgcactcaaatatgaacacaaagaaattgagtatgtggagaccgttacttntngtcagagtgaaatccanaaattcattgcagatggntgcaaanangctctgcttgaanagaanaagcgcttctgc

SEQ ID NO: 991 - DNA, 120 bp, Homo sapiens
  misc_feature 69, 70, 72, 101, 104, 119: n = A,T,C or G
gcgaatgggccctctagatgcatgctcgagcggccgcgtcgactttttttttttttttttttttttttnnangggaagaaaaaaatcttttatttttggangancaaaaataataaatng

SEQ ID NO: 992 - DNA, 309 bp, Homo sapiens
  misc_feature 37, 106, 221, 296, 297: n = A,T,C or G
ggaaaatatactttattcaataatataaacaatgtanatatatttgattaataatcattttaagtttattgcacagatgcacatgtcaataattagtgtttttcanatgggatgatatacattctgcttttatttttatctctttggtaacaattattgacagaacaatgaaacaaagataaattgttttacagttgtaatacccttgtatggtaattctnagcctcttttatcttatattctactagcacttacatctaataggtctcaataaagtagaaatgtaaaagtatgtnntttcagaaaagg

SEQ ID NO: 993 - DNA, 408 bp, Homo sapiens
  misc_feature 76, 267: n = A,T,C or G
tatagggcgaatgggccctctagatgcatgctcgagcctgggacgggaaggatgcagtgggctgtgctcacaccantgcaatccaggcctgggcgacagagtgagaccaaaagggaaaacttctgtattatctgaatagagtaaaatttgactctggcctttagtatgaataaagagctggtagctacggctctgattatgggattatcactatagggtgggcacagggctggcatttccatgtgaaatggggaggtgaagattganttggcactgattccaacttgcccatgaccttcggtggtcccttcctgggttggtcttcagcttgctccaaattaatgtgacagggttagacatgatctttcctgaagtcccttctagttcaacattctatgatgttctttg

SEQ ID NO: 994 - DNA, 190 bp, Homo sapiens
  misc_feature 15, 118, 120, 156: n = A,T,C or G
catatcatttattgnaaagcacaaaacaggcattttaaaagtgaaagtatacattgaaaaagtacatttatatcacaaagcatcaaccacataattgcaaatacatttgctggaatgngnacatctacactaaatactagggacaaaccaattttnatttctacacagaaatattaacctcctatcagta

SEQ ID NO: 995 - DNA, 237 bp, Homo sapiens
  misc_feature 14: n = A,T,C or G
attgggccctctanatgcatgctcgagaggcggagaggatcatgtccgggaactgcggggtagtagcgatctgggttacccagccgttgtggcccttgagggtgccacgaagggtcatctgctcagtcatggcggcggcgagagcgtgtgtcgctgcagcgacgaggatggcactggatggcttagagaaactagcaccacaacctctcctgccgccgccttgcagtcgacgcggcc

SEQ ID NO: 996 - DNA, 383 bp, Homo sapiens
  misc_feature 2, 31, 32: n = A,T,C or G
cnactcactatagggcgaattgggccctctnnatgcatgctcgagcggccgccctttttttttttttttggtatatagaaattttattttcttaatgcagcacagtagacatacaatcaatattattccctagaatgtgcaatatataaattattcacattaaaaaattaacagaaagcctcatatgcagtaaatatttaaaaatgtatatctaactttgattctgtttctgactatacactactagctttataaatctgaatgaatatgacatttacacatttgaatgaagtacacggatgggtccattccagatgcttattacaccgtatgaataatctgctcttcactttggtcattaaggttccatgtgctgaggcata

SEQ ID NO: 997 - DNA, 493 bp, Homo sapiens
  misc_feature 459, 462: n = A,T,C or G
gcatgctcgagctccttggcgagcacgtgaccccggcgggcacgcaggagggcaggcaggcccctgcgcaggcgctgggtggactgcttccaggtgtcatattggaagaacttgcccacggggtatctggggaagttgtccggaagcacggtcggaggggtcgacacgtccctctcggacttggcgggggtagcacagtacgtctccaggagggccaggtcacagctgcggaaacagcactcctcaacgatgccacggctgcgacggctcacacggcttgcgggcctgctgaagtagaagccgcggtccccacagacgaactggagggtgtccaccagctccccgccgcacagggtctcactggggcggtaagcagcaatgcagcacgaggcgaaggccaagaaggtgagaagcaccagcatcgacttccccattgggattcccattggtgtagctcancanaaggctcgctggggcaggaggaggaggagga

SEQ ID NO: 998 - DNA, 126 bp, Homo sapiens
  misc_feature 6, 35, 36, 112, 115, 116, 119: n = A,T,C or G
tatacnactcactatagggcgaattgggccctctnnatgcatgctcgagcggccgcccttttttttttttttttttttttttttttttttttttttttttttttttttttgnaanntanccaagtt

SEQ ID NO: 999 - DNA, 540 bp, Homo sapiens; identical to SEQ ID NO: 447

SEQ ID NO: 1000 - DNA, 587 bp, Homo sapiens
  misc_feature 11, 511: n = A,T,C or G
tgggccctctncatgcatgctcgagagagctacctttttccttttatgtataaggacacagctagaaaatgccatgtatgatccagaggcctaatttgttgatcccttaatcttggacttcccaccattgagaacagcgagaaataaatttctgttgtttataagctgccaagttcatagtatttcattacagcagcctgcacagaccaaggcagtatttttttttaatgtcttctaagggaacccccccaaaagtaaacaaaaatctacaaaagttatttgtatgatcaaaatcaaaacattcttattcacgaaatagaagctacagtaaattttcaaaaaataagagttaaaaaactccccccatatgatatattttacagtttcacaagggtaccaggtcgtgaaggaattttattaaatctattaaatcatagatagcttttaataagttcaattttactttaagagctaataagttacttgatattaacctttttacttataaggnaagtgggagatatgacatcataatcttagacatttaaaaaatcctgagaaagattatttcaatcttttacagtttg

SEQ ID NO: 1001 - DNA, 557 bp, Homo sapiens
  misc_feature 195, 260, 448, 450: n = A,T,C or G
ctttttttttttttttatagatacaattggcttttatttgtgattcatgagtcagggcagtttccattctgcaaaatatagtgatagctcctactgggcaatacaacagtagaacagtgggttttgtaaaatgggaatccaggaacagaagaatataaataaattgatttaaataaactgattggttaatttcanaatacttcatattacttttttctaagagttaaagcagaaaggactttcttactgtgctgactcanacagcctggactctcatgtttttaggaaaattttgtctgttctgggatctacctgcttcctcatgtttcagtgtgagtatatggcatttagcatgactggctccattctggagtcaccaggctgtcacctaaatgagagtttgactaaacataaggcattaacactactgtcagttaccatcattttngnacttccatcattcataggttatgatgtcctcctaatcatacatttatttgagtttttgtcattccagccaaagagagaatatttgacatttgacgaatggctgcatg

SEQ ID NO: 1002 - DNA, 633 bp, Homo sapiens
  misc_feature 12, 379, 483, 496, 503, 527, 529, 603: n = A,T,C or G
tgggccctctanatgcatgctcgagcggccgcagagttgtcgctactggagaagtccctgggactgagtaaggggaataaatacagtgctcagggcgagcgacagattccagttcttcagacaaacaatggtccaagtctaacaggattgactactatagcagctcatctagtcaagcaagccaacaaagaatatttgctggggagtactgcagaagaaaaagcaatcgttcagcagtggttagaatacagggtcactcaagtagatgggcactccagtaaaaatgacatccacacactgttgaaggatcttaattcatatcttgaagataaagtctaccttacagggtataactttacattagcagatatactattgnactatggacttcatcgctttatagttgacctgacagttcaagaaaaggagaaatatcttaatgtgtctcgctggttttgtcacattcagcattatccaggcatnaggcaacatctgnctagtgntggcttcatcaagaacagactatntnctaattcccactagaagctgtccatgccatacagaagatctattaaaaatgttttaaatgggaaatgtactctngaccacaggactaatgtaaattaatataca

SEQ ID NO: 1003 - DNA, 461 bp, Homo sapiens
  misc_feature 31: n = A,T,C or G
ttcttgctccttgtggccctctcctacactntggccagagataccacagtcaaacctggagccaaaaaggacacaaaggactctcgacccaaactgccccagaccctctccagaggttggggtgaccaactcatctggactcagacatatgaagaagctctatataaatccaagacaagcaacaaacccttgatgattattcatcacttggatgagtgcccacacagtcaagctttaaagaaagtgtttgctgaaaataaagaaatccagaaattggcagagcagtttgtcctcctcaatctggtttatgaaacaactgacaaacacctttctcctgatggccagtatgtccccaggattatgtttgttgacccatctctgacagttagagccgatatcactggaagatattcaaaccgtctctatgcttacgaacctgcagatacagctctgttgcttga

SEQ ID NO: 1004 - DNA, 145 bp, Homo sapiens
  misc_feature 29, 140: n = A,T,C or G
actcatatagggcgaattgggccctctanatgcatgctcgagcggccgcccttttttttttttttttttttttttttttttttttttttttttttttttttttgggggggggaaaattaaactttatttatttttaaagncaaac

SEQ ID NO: 1005 - DNA, 330 bp, Homo sapiens
  misc_feature 11, 12: n = A,T,C or G
tgggccctctnnatgcatgctcgagtggtattatgaggcctcaggtgccttggggtacattgtcatgctataagggatgtatatcataaggtatggtggaagaggggccttatgtgaatgattgccacatactgtttctgttgctgctttttttccgattcctttttgtcattggatttgtttgttttgtcatgtggtgaatggtgttttagttattgtgttgctgccagaatcagaatccagttcttgttcttactgccttatagttattgtgttgccaccagaatcagaatccagttcttgttcatactgccttgtagtgagggcagt

SEQ ID NO: 1006 - DNA, 51 bp, Homo sapiens
  misc_feature 14: n = A,T,C or G
attgggccctctanatgcatgctcgagcggccgcccttttttttttttttt

SEQ ID NO: 1007 - DNA, 546 bp, Homo sapiens
gccaactcacacaaggcaggtgagtgaggaaatccagagttgccatggagaaaaatccagtgtcagcattcttgctccttgtggccctctcctacactctggccagagataccacagtcaaacctggagccaaaaaggacacaaaggactctcgacccaaactgccccagaccctctccagaggttggggtgaccaactcatctggactcagacatatgaagaagctctatataaatccaagacaagcaacaaacccttgatgattattcatcacttggatgagtgcccacacagtcaagctttaaagaaagtgtttgctgaaaataaagaaatccagaaattggcagagcagtttgtcctcctcaatctggtttatgaaacaactgacaaacacctttctcctgatggccagtatgtccccaggattatgtttgttgacccatctctgacagttagagccgatatcactggaagatattcaaaccgtctctatgcttacgaacctgcagatacagctctgttgcttgacaacatgaagaaagctc

SEQ ID NO: 1008 - DNA, 548 bp, Homo sapiens; identical to SEQ ID NO: 855

SEQ ID NO: 1009 - DNA, 524 bp, Homo sapiens
  misc_feature 45, 83, 89, 366, 405, 407, 478, 503: n = A,T,C or G
tgcatgctcgagcggccgccctttttttttttttttttttttttngatggagtgtctctctgtcacccaggctggagtgcagnggtgcnatctcggctcactgcaacctccgcctcccaagttcaagcaattcttctgcctcagcctcccaagtagctgggactacaggcgcacgctgccacacctggctgatttttggatttttagtagtgacggggtttcaccatcttggtcaggctggtctggtcttgaactcctgacctcatgatccacccgtctcggcctcccaaagtgctaggacaatacatttattattaaacaccatattctcagtaagttttaactaattatttctgtcatcttcanaaattctaaattattgaatgattttgattatggttacananagttgtccgaactgattgcaaatgctgacaaaaccctgaaatttctggtacttcggtaggcattaccaganaagcagccacctagtttgttagcanaaagcttatttacattttact

SEQ ID NO: 1010 - DNA, 614 bp, Homo sapiens
  misc_feature 9, 33: n = A,T,C or G
tacgactcntatagggcgaattgggccctctanatgcatgctcgagtcggccagctggatctcccacaaggtttccttgttaaaagggtgcttaagtaacctggccggcagcacgacttatgatgaagcacgaagaagccaggttctgtgtcgatcactctctcagtcccctcaactgctcatcttaaactatttggttcctgacacgtttccaaaaggggaaaggggaaaaggggaaggggggaaggggaacataaaaagtatttgttacatttaaaaagggggggaaggggaaagagctgtatctatgttcacctcattcaacttccttgagttatggcactatgatgttgcttaattaggtaagacatggatatttgcaccgagtgcaaatactgttcataacaaggtcatagctagaaagacagatgggctcaagtgtggacaaataatgtcatcaaggtaatagatcaaaaatattaaagccctataaaagatctgagcagtcaactccaaaacatccacatgacaaagtccttaaaatacaaatctcattactcttactcatgcaactgctaaaaaatagtgtgcagatatgtatttatatttgcctt

SEQ ID NO: 1011 - DNA, 333 bp, Homo sapiens
tgggccctctagatgcatgctcgaggttatggaacagcacatttctagaggaatattccaaactgaactacttggacattctcatgcgagccttcattgatgtgactgctgctgccgaaaatatcaggctgccaaatgcaggcactcaggttcgagtgactgtgtttccctcaaagactgtagctcagtattcgggagtaccttggtggatcatcctagtggctattctcgctgggatcttgatgcttgctttattagtgtttatactatggaagtgtggattctttaaacgctctaggtacgatgacagtgttccccgataccatgctgtaa

SEQ ID NO: 1012 - DNA, 325 bp, Homo sapiens
gccaactcacacaaggcaggtgagtgaggaaatccagagttgccatggagaaaaatccagtgtcagcattcttgctccttgtggccctctcctacactctggccagagataccacagtcaaacctggagccaaaaaggacacaaaggactctcgacccaaactgccccagaccctctccagaggttggggtgaccaactcatctggactcagacatatgaagaagctctatataaatccaagacaagcaacaaacccttgatgattattcatcacttggatgagtgcccacacagtcaagctttaaagaaagtgtttgctgaaaa

SEQ ID NO: 1013 - DNA, 257 bp, Homo sapiens
  misc_feature 34: n = A,T,C or G
tacgactcactatagggcgaattgggccctctanatgcatgctcgagataaaaccatcaagctatggaataccctgggtgtgtgcaaatacactgtccaggatgagagccactcagagtgggtgtcttgtgtccgcttctcgcccaacagcagcaaccctatcatcgtctcctgtggctgggacaagctggtcaaggtatggaacctggctaactgcaagctgaagaccaaccacattggccacacaggctatctga

SEQ ID NO: 1014 - DNA, 609 bp, Homo sapiens
  misc_feature 476, 579, 597: n = A,T,C or G
catgcatgctcgagtctttaatataaccccaaatgaaagaaccaaggggaggggtgggatggcacttttttttgttggtcttgttttgttttgttttttggttggttggttcgttattttttaagattagccattctctgctgctatttccctacataatgtcaatttttaaccataattttgacatgattgagatgtacttgaggcttttttgttttaattgagaaaagactttgcaattttttttttaggatgagcctctcctagacttgacctagaatattacatattcctccagtaagtaatactgaagagcaaaagagaggcaggattggggtcacagccgcttcttcagcatggaccaagtgggccttggggattgcagcgttctcgaagtggctgtaggactcgaatttacagaaagccacagaggtgcaacttgaggctctgctagcaagccaccagtgaggctattngggtaaccacctttctatacaggagattggaatctactttgtcatttatccaccacagtgacaaaggaaaagtggtgccgttatgcaatccatttaactcatnaacatattactctgagtnactggccagcca

SEQ ID NO: 1015 - DNA, 511 bp, Homo sapiens
gccaactcacacaaggcaggtgagtgaggaaatccagagttgccatggagaaaaatccagtgtcagcattcttgctccttgtggccctctcctacactctggccagagataccacagtcaaacctggagccaaaaaggacacaaaggactctcgacccaaactgccccagaccctctccagaggttggggtgaccaactcatctggactcagacatatgaagaagctctatataaatccaagacaagcaacaaacccttgatgattattcatcacttggatgagtgcccacacagtcaagctttaaagaaagtgtttgctgaaaataaagaaatccagaaattggcagagcagtttgtcctcctcaatctggtttatgaaacaactgacaaacacctttctcctgatggccagtatgtccccaggattatgtttgttgacccatctctgacagttagagccgatatcactggaagatattcaaaccgtctctatgcttacgaacctgcaga

SEQ ID NO: 1016 - DNA, 658 bp, Homo sapiens
  misc_feature 28, 637: n = A,T,C or G
ctcatatagggcgaattgggccctctanatgcatgctcgagcggccgccctttttttttttttttactttgacaacaaattatattttaaatgtttcatatttacttttatatttccatacaatcagaaacagtaaaaaaaatttggagagcacataaaaacatcttaaagttaaaaatataaagccttgtatttaaaaatgcagtcatttaaataatattataagaatctatttgtacataataaacaagtttcaaccagcaagaaattactaatattgactgtggagttttggctgttttaatagttctaactcattattccgtaattcaacacagcactaccaacacagctggcaatgacaagactgggagtatcaaactaggattgttagttcaattaaaatttcagataaacaataatgtacttatactaaaaaattatttgttgtttatctgaaatgaaaatttaactgggtacccaattgtttgtttgtttaatctaaaaaccctgattgaaatttatctaataaaacatcatttaatatctaaaataaaataaatttactataacatctttataactattcaatcaatgattcatcttctatttttccaaattcttgcacaaatatttnatgcttaaataaatacataaa

SEQ ID NO: 1017 - DNA, 225 bp, Homo sapiens
  misc_feature 11: n = A,T,C or G
gtatacgactncatatagggcgaattgggccctctagcatgcatgctcgagcggccgcgtcgacgaccaagaagatgtgctgctgttcctacaacattggccgggcgtggaacaagccctgtgaacagtgtcccatcccaagtacagatgagtttgctacactctgtggaagtcaaaggccaggctttgtcatcgacatttataccggtttacccgttgatattg

SEQ ID NO: 1018 - DNA, 582 bp, Homo sapiens
catgcatgctcgagtcggccagctggatctcccacaaggtttccttgttaaaagggtgcttaagtaacctggccggcagcacgacttatgatgaagcacgaagaagccaggttctgtgtcgatcactctctcagtcccctcaactgctcatcttaaactatttggttcctgacacgtttccaaaaggggaaaggggaaaaggggaaggggggaaggggaacataaaaagtatttgttacatttaaaaagggggggaaggggaaagagctgtatctatgttcacctcattcaacttccttgagttatggcactatgatgttgcttaattaggtaagacatggatatttgcaccgagtgcaaatactgttcataacaaggtcatagctagaaagacagatgggctcaagtgtggacaaataatgtcatcaaggtaatagatcaaaaatattaaagccctataaaagatctgagcagtcaactccaaaacatccacatgacaaagtccttaaaatacaaatctcattactcttactcatgcaactgctaaaaaatagtgtgcagatatgtatttatatttgcctt

SEQ ID NO: 1019 - DNA, 585 bp, Homo sapiens
  misc_feature 25, 363: n = A,T,C or G
ctttttttttttttttgaaatttanaaacaaattttatttaagatctgaaatacaattcctaaaatatcaacttttccagaaaaccgtggctacacaataatgcattgcctctatcatgttagaacgtgcattagactcaaatacaaaaaccatgaaacaaatcaccatccttcaacaatttgagcaaagatagaatgcctaagaacaacatagatggacttgcagaggatgggctgttttacttcaagcaccataaaaaaaaaaaagagcacaaatgcatgggttttcaggtatatacattaagttgaacctttggcactaggaatcagggcgttttgtcacatagcattaacacatattanaaaattgtgtagtgtcaaagggataggaaccaccagcattcaagcaatgttgtcaactaggcaataaaatgttctactgaatgtttcttctttgttctaattactgcatacactggtagcaactttgaaatgagaaaaggagcttacactccttttattttctgtttaaaacagaacgggaaacaaactgaaacataagccctgttatacattaacgatttt

SEQ ID NO: 1020 - DNA, 172 bp, Homo sapiens
tgcatgctcgaggcccactcgctcggcaggattatgcgatcacggatcagtcagagcagggtcaggagacggggctgacggcacgggtggcggggacagacgtttgggacttggccgcgactctctgcttctctccagctctcaatctgctgcattttcctctagtgcttcc

SEQ ID NO: 1021 - DNA, 630 bp, Homo sapiens
  misc_feature 486, 562, 567: n = A,T,C or G
tgggccctctagatgcatgctcgagtctttaatataaccccaaatgaaagaaccaaggggaggggtgggatggcacttttttttgttggtcttgttttgttttgttttttggttggttggttcgttattttttaagattagccattctctgctgctatttccctacataatgtcaatttttaaccataattttgacatgattgagatgtacttgaggcttttttgttttaattgagaaaagactttgcaatttttttttaggatgagcctctcctagacttgacctagaatattacatattcctccagtaagtaatactgaagagcaaaagagaggcaggattggggtcacagccgcttcttcagcatggaccaagtgggccttggggattgcagcgttctcgaagtggctgtaggactcgaatttacagaaagccacagaggtgcaacttgaggctctgctagcaagccaccagtgaggctattngggtaaccacctttctatacaggagattggaatctactttgtcatttatccaccacagtgacaaaggaaaagtggntgccngttatgcaatccatttaactcataaacatattactctgagtaactggccagccattcatcgga

SEQ ID NO: 1022 - DNA, 258 bp, Homo sapiens
gcatgctcgagcggccgcgtcgaccagcattcgggccgagatgtctcgctccgtggccttagctgtgctcgcgctactctctctttctggcctggaggctatccagcgtactccaaagattcaggtttactcacgtcatccagcagagaatggaaagtcaaatttcctgaattgctatgtgtctgggtttcatccatccgacattgaagttgacttactgaagaatggagagagaattgaaaaagtggagcattcaga

SEQ ID NO: 1023 - DNA, 587 bp, Homo sapiens
  misc_feature 12, 70, 179, 182, 231, 257, 369, 382, 402, 433, 440, 466,475, 500, 513, 516, 559, 569, 580, 581: n = A,T,C or G
tgggccctctancatgcatgctcgagcggccgcccttttttttttttttttttttttttttttttatttnaaatatttttatttctccaaatttgttatttatcaggagtgactgaaataaaaaatacaattgagtcccatcatcatcatcatggaaatggctttaagagaaaactggncanatgaatattattgcttcccattttcaaccagtaaatagttgccactganaaactgacagccaggagtctgtcaanaatgctcaagatatgttatataatacaacatgcctgttcacagggggaaaaatcctaggaaataacttatggggacttcttgatttcatcatacaagacaagcacaaaagcnccacccatgcctntgagaacattggaccatgcncccttgaaaaaagctttgcctccttatcacnagcaatnttccgccagcagtcaagcgtgcctgngtacatgangtcagttcctttgcgccctgactgnatcatcatgcggnggngaacggggtcaaatggataggaagtcaacccggcaacagcagngacagtctgngcgatcatccnnctgatg

SEQ ID NO: 1024 - DNA, 474 bp, Homo sapiens
  misc_feature 431: n = A,T,C or G
gtcgacttttttttttatagatacaattggcttttatttgtgattcatgagtcagggcagtttccattctgcaaaatatagtgatagctcctactgggcaatacaacagtagaacagtgggttttgtaaaatgggaatccaggaacagaagaatataaataaattgatttaaataaactgattggttaatttcagaatacttcatattacttttttctaagagttaaagcagaaaggactttcttactgtgctgactcagacagcctggactctcatgtttttaggaaaattttgtctgttctgggatctacctgcttcctcatgtttcagtgtgagtatatggcatttagcatgactggctccattctggagtcaccaggctgtcacctaaatgagagtttgactaaacataaggcattaacactactgncagttaccatcattttggacttccatcattcatagggtatgat

SEQ ID NO: 1025 - DNA, 538 bp, Homo sapiens
  misc_feature 212: n = A,T,C or G
atgcatgctcgagcggccgccctttttttttttttttggctctagagggggtagagggggtgctatagggtaaatacgggccctatttcaaagatttttaggggaattaattctaggacgatgggcatgaaactgtggtttgctccacagatttcagagcattgaccgtagtatacccccggtcgtgtagcggtgaaagtggtttggtttanacgtccgggaattgcatctgtttttaagcctaatgtggggacagctcatgagtgcaagacgtcttgtgatgtaattattatacgaatgggggcttcaatcgggagtactactcgattgtcaacgtcaaggagtcgcaggtcgcctggttctaggaataatgggggaagtatgtaggagttgaagattagtccgccgtagtcggtgtactcgtaggttcagtaccattggtggccaattgatttgatggtaagggagggatcgttgacctcgtctgttatgtaaaggatgcgtagggatgggagggcgatgaggactaggatgatgg

SEQ ID NO: 1026 - DNA, 378 bp, Homo sapiens
  misc_feature 2, 7, 31: n = A,T,C or G
cnactcnctatagggcgaattgggccctctncatgcatgctcgagtgggtgctaggaccaaggcctgggtggcttttagatctaattcaatctgctgcagaattgatatggcaaatgtggccgttttcccagtcccagattgggcttgagcaatcacatcataacccttgatacaaggtagaatggctcgctgctggatggcagagggcttctcaaaaccataggcgtagatgccacggagaagggactccgagaggttcatgtcatcaaagctgtcaacaatctcattccagttactctcgatgacgccttcgggctccatcccatcggggccattgtctctggatcgggaatcctggctcgcaggtcgacgcggcc

SEQ ID NO: 1027 - DNA, 600 bp, Homo sapiens
  misc_feature 508, 577: n = A,T,C or G
gtcgacgcattcgggccgagatgtctcgctccgtggccttagctgtgctcgcgctactctctctttctggcctggaggctatccagcgtactccaaagattcaggtttactcacgtcatccagcagagaatggaaagtcaaatttcctgaattgctatgtgtctgggtttcatccatccgacattgaagttgacttactgaagaatggagagagaattgaaaaagtggagcattcagacttgtctttcagcaaggactggtctttctatctcttgtactacactgaattcacccccactgaaaaagatgagtatgcctgccgtgtgaaccatgtgactttgtcacagcccaagatagttaagtgggatcgagacatgtaagcagcatcatggaggtttgaagatgccgcatttggattggatgaattccaaattctgcttgcttgctttttaatattgatatgcttatacacttacactttatgcacaaaatgtagggttataataantgttaacatggacatgatcttctttataattctactttgagtgctgtctccatgtttgatgtatctgancaggttgctccacaggtagctct

SEQ ID NO: 1028 - DNA, 522 bp, Homo sapiens
  misc_feature 11: n = A,T,C or G
aaggtgccatntatgatccaaaggcctaatttgttgatcccttaatcttggacttcccaccattgagaacagcgagaaataaatttctgttgtttataagctgccaagttcatagtatttcattacagcagcctgcacagaccaaggcagtatttttttttaatgtcttctaagggaacccccccaaaagtaaacaaaaatctacaaaagttatttgtatgatcaaaatcaaaacattcttattcacgaaatagaagctacagtaaattttcaaaaaataagagttaaaaaactccccccatatgatatattttacagtttcacaagggtaccaggtcgtgaaggaattttattaaatctattaaatcatagatagcttttaataagttcaattttactttaagagctaataagttacttgatattaacctttttacttataaggtaagtgggagatatgacatcataatcttagacatttaaaaaatcctgagaaagattatttcaatcttttacagtttg

SEQ ID NO: 1029 - DNA, 418 bp, Homo sapiens
ctatagggcgaattgggccctctagatgcatgctcgagaaggctggtaaagaagacatggcacagcttatgaatatagagtaaagtggcaccttcgatgcgaagctgacgaattgcagtatgaacagcggctgccctgtttctcaaaaatagctcacaggccttcgtgcactggcccagccggatcagttgcgaaactgctctgcgagtagccttcggaccacctctcagggaacgatctggggagagttcgaaaactagcacctcagtgagctgtcgaactcgctcctccactttggcccttagttcttttacaggaggtgggctaggtttatcttccaggtaatggttcaatttatccagcaggtcaaccgccccttcaaagtctctctgcgcaatgcagacatccaggtcttcag

SEQ ID NO: 1030 - DNA, 58 bp, Homo sapiens
  misc_feature 41, 44, 52, 53: n = A,T,C or G
gcatgctcgagcggccgcccttttttttttttttttggctntanagggggtnnagggg

SEQ ID NO: 1031 - DNA, 625 bp, Homo sapiens
  misc_feature 10: n = A,T,C or G
tatacgactnctatagggcgaattgggccctctagatgcatgctcgaggggtgtgttcctacttagctttgtacagcccagatgtgatatttctacaggaagttattcccccatattatagctacctaaagaagagatcaagtaattatgagattattacaggtcatgaagaaggatatttcacagctataatgttgaagaaatcaagagtgaaattaaaaagccaagagattattccttttccaagtaccaaaatgatgagaaaccttttatgtgtgcatgtgaatgtgtcaggaaatgagctttgccttatgacatcccatttggagagcaccagagggcatgctgcggaacgaatgaatcagttaaaaatggttttaaagaaaatgcaagaggctccagagtcagctacagttatatttgcaggagatacaaatctaagggatcgagaggttaccagatgtggtggtttacccaacaacattgtggatgtctgggagtttttgggcaaacctaaacattgccagtatacatgggatacacaaatgaactctaatcttggaataactgctgcttgtaaacttcgttttgatcgaatatttttcagagcagcagcagaagaggg

SEQ ID NO: 1032 - DNA, 539 bp, Homo sapiens; identical to SEQ ID NO: 957

SEQ ID NO: 1033 - DNA, 118 bp, Homo sapiens
gcatgctcgagaccagccaactctcacatttcagtccgtttatcactttaccaacagtggacagctttactcccaggcccaaaaaaattatccgtacagccccagatgggatggaatg

SEQ ID NO: 1034 - DNA, 222 bp, Homo sapiens
gccaactcacacaaggcaggtgagtgaggaaatccagagttgccatggagaaaaatccagtgtcagcattcttgctccttgtggccctctcctacactctggccagagataccacagtcaaacctggagccaaaaaggacacaaaggactctcgacccaaactgccccagaccctctccagaggttggggtgaccaactcatctggactcagacatatgaag

SEQ ID NO: 1035 - DNA, 352 bp, Homo sapiens
  misc_feature 3, 7, 8, 38, 39, 313: n = A,T,C or G
gtntacnnctcactatagggcgaattgggccctctagnngcatgctcgagcggccgcgtcgactgcgcacatcgctattgcggttccgaggcagtgggaagagatgcggcccctggacatcgtcgagctggcggaaccggaggaagtggaggtgctggagcccgaggaggatttcgagcagtttctgctcccggtcatcaacgagatgcgcgaggacatcgcgtcgctgacgcgcgagcacgggcgggcgtacctgcggaaccggagcaagctgtgggagatggacaatatgctcatccagatcaaaacgcangtggaggcctcggaggagagcgccctcaaccacctccag

SEQ ID NO: 1036 - DNA, 668 bp, Homo sapiens
  misc_feature 12, 578: n = A,T,C or G
ttgggccctctnatgcatgctcgagcggccgccctttttttttttttttatagagctaattggcttttatttgtgatttatgaattaaagcagcaccactctacaagtacagtgatagctccccctgggcaatacaatacaagaacagtgggttttgtcaaattggaacaaggaaacagaaccacagaaataaatacattggttaacatcagattagttcaggttacttttttgtaaaagttaaagtagaggggacttctgtattatgctaactcaagtagactggaatctcctgtgttctttttttttttaaattggttttaattttttttaattggatctatcttcttccttaacatttcagttggagtatgtagcatttagcaccactggctcaatgcgctcacctaggtgagagtgtgaccaaatcttaaagcattagtgctattatcagttaccaccatttggggcttttatccttcatgggttatgatgttctcctgatgacacatttctctgagttttgtaattccagccaaagagagaccattcactatttgatggctggctgcatgcanacatttaaagcttttagagaatacactacaccagggagtatgactactagtatgactattaggagggtaataccaagagttggactacgc

SEQ ID NO: 1037 - DNA, 617 bp, Homo sapiens
  misc_feature 558: n = A,T,C or G
gccaactcacacaaggcaggtgagtgaggaaatccagagttgccatggagaaaaatccagtgtcagcattcttgctccttgtggccctctcctacactctggccagagataccacagtcaaacctggagccaaaaaggacacaaaggactctcgacccaaactgccccagaccctctccagaggttggggtgaccaactcatctggactcagacatatgaagaagctctatataaatccaagacaagcaacaaacccttgatgattattcatcacttggatgagtgcccacacagtcaagctttaaagaaagtgtttgctgaaaataaagaaatccagaaattggcagagcagtttgtcctcctcaatctggtttatgaaacaactgacaaacacctttctcctgatggccagtatgtccccaggattatgtttgttgacccatctctgacagttagagccgatatcactggaagatattcaaaccgtctctatgcttacgaacctgcagatacagctctgttgcttgacaacatgaagaaagctctcaagttgctgnagactgaattgtaaagaaaaaaatctccaagcccttctgtctgtcaggccttgagactt

SEQ ID NO: 1038 - DNA, 541 bp, Homo sapiens
  misc_feature 431: n = A,T,C or G
gccaactcacacaaggcaggtgagtgaggaaatccagagttgccatggagaaaaatccagtgtcagcattcttgctccttgtggccctctcctacactctggccagagataccacagtcaaacctggagccaaaaaggacacaaaggactctcgacccaaactgccccagaccctctccagaggttggggtgaccaactcatctggactcagacatatgaagaagctctatataaatccaagacaagcaacaaacccttgatgattattcatcacttggatgagtgcccacacagtcaagctttaaagaaagtgtttgctgaaaataaagaaatccagaaattggcagagcagtttgtcctcctcaatctggtttatgaaacaactgacaaacacctttctcctgatggccagtatgtccccaggattatngtttgttgacccatctctgacagttagagccgatatcactggaagatattcaaaccgtctctatgcttacgaacctgcagatacagctctgttgcttgacaacatgaaga

SEQ ID NO: 1039 - DNA, 667 bp, Homo sapiens
  misc_feature 29, 139, 187, 193, 249, 273, 328, 333, 400, 452, 516, 518,567, 656: n = A,T,C or G
ctcattatagggcgaattgggccctctanatgcatgctcgagcggccgcccttttttttttttttttttttgagatcagaattaaattctttaatacaaaatgcttttttttttttaagatatatctgtatttctttgncgttgtttaaaaataaatatgtactacggaatatctcgaaaaactgcnctaganacaaagacgtgatgttaatatcttttccccacaattattacggataaacagtagcnccaataaataaatgataacaaatnttaaaattaaaaaaggaaagagatttagtatgtagaattctctattttttcttgntttgnttttacatataaaaaacagaatagcaatgtctattttatcagaatcacatatatacataaacatatntatatatatatacacacaaatacaagttgccaaatatatatatagtatgtanatgtatattgaaaccttatttcaaaggaatgtgtgctggggagccaggggatcggggagggcananctgagtgttagcaaaattaaatatctgttcaagataagctagtgactgncaccgatcagggagagagagattggaaacatgaattttatttacaaaaaccggtccaaattaagagagcaagagagagcaaaagatacntctcataaata

SEQ ID NO: 1040 - DNA, 518 bp, Homo sapiens
  misc_feature 2, 492: n = A,T,C or G
cnactcctatagggcgaattgggccctctacatgcatgctcgagctccttggcgagcacgtgaccccggcgggcacgcaggagggcaggcaggcccctgcgcaggcgctgggtggactgcttccaggtgtcatattggaagaacttgcccacggggtatctggggaagttgtccggaagcacggtcggaggggtcgacacgtccctctcggacttggcgggggtagcacagtacgtctccaggagggccaggtcacagctgcggaaacagcactcctcaacgatgccacggctgcgacggctcacacggcttgcgggcctgctgaagtagaagccgcggtccccacagacgaactggagggtgtccaccagctccccgccgcacagggtctcactggggcggtaagcagcaatgcagcacgaggcgaaggccaagaaggtgagaagcaccagcatcgacttccccattgggattcccattggtgtagctcancagaaggctcgctggggcaggaggag

SEQ ID NO: 1041 - DNA, 525 bp, Homo sapiens
  misc_feature 98, 477: n = A,T,C or G
gtcgacttttttttttttaagcaaagaaaaatcatttttaatataaaaattctatatcaagagatattccttaaataatataccaatgaaaatgtgtncataaatgaaaaaactttgaaaaataaaatcagacaaatataaagcactattaccaacaataagatgttataagttttaaatattacagccatttttatattttggctaaaaaaagggcttacatgaaaaaaatgcattgaaaaacatcatttttaaacatgaaagaacaaaccagaagaattccaaattcagatagatttttgaaactttttatttatattttggtcttacaaatgatcacttttaaatggacttttctgtaagaatgtaaaactcaaaaatttgccaagtatgtatctgatccacacaaatccttagaaaggttttctgtgtagtcttcattaacgcaaatctttgtgaatgtttcactcttactgnaggatcttgaatatgttttacaataatgaagctacaaagtttttatgc

SEQ ID NO: 1042 - DNA, 222 bp, Homo sapiens
tgcatgctcgagataaaaccatcaagctatggaataccctgggtgtgtgcaaatacactgtccaggatgagagccactcagagtgggtgtcttgtgtccgcttctcgcccaacagcagcaaccctatcatcgtctcctgtggctgggacaagctggtcaaggtatggaacctggctaactgcaagctgaagaccaaccacattggccacacaggctatctga

SEQ ID NO: 1043 - DNA, 69 bp, Homo sapiens
ctgcagtcaccgaagtgtcacctgaccttgcgcctaggggacctaatttatcttttatgtatcttactg

SEQ ID NO: 1044 - DNA, 548 bp, Homo sapiens; identical to SEQ ID NO: 855

SEQ ID NO: 1045 - DNA, 540 bp, Homo sapiens
tacgactcctatagggcgaattgggccctctacatgcatgctcgagcggccgccctttttttttttttttagttttttaaaaaatgtttattttttcaaagaaaacggcaatagccaattggaaacctacttattcttcaactccaattttgttttctttaaatttagaagtgacttactgatttactattttaaacaaaccccccctttcccctttaaatgtttaccatctactcgtgctgaatccttccaaggagattgctccagcgtttatctccaggtcctcgctttgctccttttaccaaaaaacgcaaaacacaattccatcgtgcatcttaagggctccaatcgtcaaaaataggaaaaaaaaaatctttggaatagccaattaagttgaataaaaaaatccacacgaatgcggtttggttggggcaggaatccactcctatgttcctggtaatctgatcccgctccatgaatcctggtaattcatcctccctatcctatccacattatgatttgaatccaatgatccagctc

SEQ ID NO: 1046 - DNA, 345 bp, Homo sapiens
ttgggccctctagatgcatgctcgagcggccgcgacgcccgccgcagctggggcgatccacgggaagggcccggctcgcgtccagagtcgccgccgccgccggccccccgggtgcccgggcccccctcgcgggggaccgtgcccccgccgccggggccccgcggcgggccgccgccggcccctgccgccccgacccttctccccccgccgccgcccccacgcggcgctcccccggggaggggggaggacggggagcgggggagagagagagagagagggcgcggggtggggagggagcgagcggcgcgcgcggggtggggcgggggagggccgcgaggggggtgc

SEQ ID NO: 1047 - DNA, 751 bp, Homo sapiens
  misc_feature 11, 12, 667, 690, 717, 721: n = A,T,C or G
tgggccctctnnatgcatgctcgagcagttaccaaggaccactttactgcgatcaggattccaacgaccacctaatttcgtatctttcaactcttttcgaccggacctcttattcggaagcgttacaggaagacaggtctcaacttagggatcagatcacgttatcaacgctctgggatcgctgcaacctggcacttcaaggaagtgcaccgataacgtctagaccggcaaacacagatctagaggtggccaactgatcactgtaggagctgactggcaaagtcaaccaggcccaaccaagagtgaccaagacaacgattaggataacccacaggcactcctcgtcataaggccaacgacacagacaggctggcaaataaagggtttaatatttggttaaaaattgattttaaaaaacaagaaaaatatcctcaaaacatttacatttgatcactaatattaaagttcaaaatatcccccaaattacatttaattaaatgtttaaaattacaattccattaaatccattaatttaaaactacttttaataaaacaatacaacattagctacccattaacttttttaaaaagccacatcaaaataactcaaaactgtatttcaacaaacctgccagctgactcttgaggataaattctcaactataangacgattttctgttcttacaggnggagcatttcgtctatcatttcgaggnctgngactactaaaacgggcagagtatcgtcctc

SEQ ID NO: 1048 - DNA, 684 bp, Homo sapiens
  misc_feature 11, 12, 36, 552: n = A,T,C or G
tatacgactcnntatagggcgaattgggccctctanatgcatgctcgaggtggtggcagggccgccccctgcagtccggagacgaacgcacggaccgggcctccggaggcaggttcggctggaaggaaccgctctcgcttcgtcctacacttgcgcaaatgtctccgagcttactcacatagcatattggtatatcaaaatgaaatgcaaggaaccaaaaataacataattgaaggcagtaaaagtgaaattaaataggaagatcatcagtcaaggaagacccactggagaggacagaaaatgaagcagtgttttatcatgtgtatttcagcaggtcttcttgaaatttaactaaaaatatgactgctctctcttcagagaactgctcttttcagtaccagttacgtcaaacaaaccagcccctagatgttaactatctgctattcttgatcatacttgggaaaatattattaaatatccttacactaggaatgagaagaaaaaacacctgtcaaaattttatggaatatttttgcatttcactagcattcngttgatcttttacttttggtaaacatttccattatattgtatttcaggggattttgtacttttaagcattaggttcactaaataccacatctgcctatttactcaaattatttcctttacttatggcttttt

SEQ ID NO: 1049 - DNA, 53 bp, Homo sapiens
  misc_feature 43: n = A,T,C or G
atgcatgctcgagcggccgcccttttttttttttttttggttnaggaaataaa

SEQ ID NO: 1050 - DNA, 634 bp, Homo sapiens
  misc_feature 8: n = A,T,C or G
acgactcntatagggcgaattgggccctctagatgcatgctcgagaggacaaaaacccacaccggacatagatcacaaaacttcctagaactctcctttaaatcggaagaaatttgtaaaatgtgatatgaaatacaactctacaaacatccaaaatacatttctggtcataattaatcgtatttgacattttcctctaagtttaatgcaactttaaataatttaggctttttcctaacatgatagatttttttcagtatcagaaatggacaagaggaaactccagtaaagagaaaagcaatgaatttaaaagggtgcagaatctgaaaacaaactaaccacaatgtacatttaattgtacttaattgtatatttcatttaaatagtccttctcaggggtttaataatttagaatcaatagttcccttcaaaacataataaaatatttacactttataaaatattaaccgattaacaatacagccgtgttgtttataagagtgtaactgaagtcctgcaaatcatgctgttgacacaagcctgtgaggttagcgaagtgatccttagcaaaatgtaaatgaagatcttcagacagtggtgtttataaaatagctcattaatgacttaggattga

SEQ ID NO: 1051 - DNA, 539 bp, Homo sapiens; identical to SEQ ID NO: 957

SEQ ID NO: 1052 - DNA, 530 bp, Homo sapiens
  misc_feature 410: n = A,T,C or G
gccaactcacacaaggcaggtgagtgaggaaatccagagttgccatggagaaaaatccagtgtcagcattcttgctccttgtggccctctcctacactctggccagagataccacagtcaaacctggagccaaaaaggacacaaaggactctcgacccaaactgccccagaccctctccagaggttggggtgaccaactcatctggactcagacatatgaagaagctctatataaatccaagacaagcaacaaacccttgatgattattcatcacttggatgagtgcccacacagtcaagctttaaagaaagtgtttgctgaaaataaagaaatccagaaattggcagagcagtttgtcctcctcaatctggtttatgaaacaactgacaaacacctttctcctgatggncagtatgtccccaggattatgtttgttgacccatctctgacagttagagccgatatcactggaagatattcaaaccgtctctatgcttacgaacctgcagatacagctctgttgcttgac

SEQ ID NO: 1053 - DNA, 732 bp, Homo sapiens
  misc_feature 186, 189, 330, 373, 450, 540, 594, 649, 664, 701: n = A,T,C or G
ctttttttttttttttttataatatgatcccatttatttaaaaaataaagattacatatttgcttatatacgcatacaaattttctgaaaattacataagaaattgttaatagattacctctggagaatagtactggggtaagaggtgagggggcagaattctcattttacagccttatatactgntgngaatttttttttttaccatgtactttttaaaaatacaaaattgaggagggaacctcctactccaaaattacgaagcattcttttatgtacatttctctaagagttatatttgatatttttcaaggcaaactgacttgaggnactcgatgtttttaaatgtatttctaataattattagtagggncacacctatttgacagcttttttaaaaagtcacatattgctgtatttttaaagatgacaaacctttatttaaatganatgcttgctggagattttctttttcaaactcactttttaagttatggaaataatatcactgctgaaagtttggaaaacatatataagggngccaaaaataccactaaaatcacataaaccaatcttaccattattaatgggggngatttctttctttacatatctattaatacctagtactatctatgtagaaaaatgngtttgcaaagctganatcacactgtacctatagctctggatccgagctcggnaccaagccttggcgtaatcatgggcatagct

SEQ ID NO: 1054 - DNA, 583 bp, Homo sapiens
attgggccctctacatgcatgctcgagcaccgtcattaccccgagcacctgcagccccaggaagtcctggccgtcctcgctcaccaggagcccctcttggacccatgggtccaggagctccattttcgcctggaagaccattttcaccctttaatccaggagcacctgtttcacccttttctccatttcgtccatcgaagcctctgtgtcctttcataccagggaatccaggtatcccagctggacctttgatacctggaggtccaggcaatcctcgctctccaggtcgtccgggtctacctgattctccatcttttccagcaggaccagatggacctatagcaccaggaggtcctggagggcctgaaggaccagcttgcccaggttcaccagggggtccttggtatcctggagatccaggggaaccaggatgaccagatgtaccagggggaccgggagggcctggggggccagctggtccaggatagcctgcgagtcctcctactgctactccagacttgacatcatatgaatcatactggggagaatagttctgaggaccagtagggcatgattcacagat

SEQ ID NO: 1055 - DNA, 362 bp, Homo sapiens
agggcgaattgggccctctacatgcatgctcgagctccttggcgagcacgtgaccccggcgggcacgcaggagggcaggcaggcccctgcgcaggcgctgggtggactgcttccaggtgtcatattggaagaacttgcccacggggtatctggggaagttgtccggaagcacggtcggaggggtcgacacgtccctctcggacttggcgggggtagcacagtacgtctccaggagggccaggtcacagctgcggaaacagcactcctcaacgatgccacggctgcgacggctcacacggcttgcgggcctgcctggaagtctgaagtagaagccgcggtccccacagacgaactggagggtg

SEQ ID NO: 1056 - DNA, 592 bp, Homo sapiens
  misc_feature 31, 548, 551, 582: n = A,T,C or G
gactcactatagggcgaattgggccctctanatgcatgctcgagcggccgccctttttttttttttttttttaataagtcaaagcattgtttatttatgacatatttacatatttacaaaactgattttactcaatacatcatcctgcgtaatatcataaaatgaacaccatatcctgggaataaaaatccatatttcttaataatttatgtatagcccaacttttagaacatagaatattatcaatttggcttcccaaactacaaagtcctgtttataattttttctagccaaggaacagagtagattcaacagcatattaaagtaatttagttaaccctgagtaattactaacttgcataattttgaatggatgtatataacacactttcatctgcacttagatacttatactatcacactacctttttgtatttatccacctcaattttcaacttcattaatcttcagaagaaagaggaataaagaataggaaagtaataacagaatcattacgaggaaattactagcactgcctaaacattcanaangtctgtgacacagtttaggtctaggggttgnctcaaaaacc

SEQ ID NO: 1057 - DNA, 581 bp, Homo sapiens
  misc_feature 9, 520, 535, 564: n = A,T,C or G
gtatacgantactatagggcgaattgggccctctagatgcatgctcgagagagctacctttttccttttatgtataaggacacagctagaaaatgccatgtatgatccagaggcctaatttgttgatcccttaatcttggacttcccaccattgagaacagcgagaaataaatttctgttgtttataagctgccaagttcatagtatttcattacagcagcctgcacagaccaaggcagtatttttttttaatgtcttctaagggaacccccccaaaagtaaacaaaaatctacaaaagttatttgtatgatcaaaatcaaaacattcttattcacgaaatagaagctacagtaaattttcaaaaaataagagttaaaaaactccccccatatgatatattttacagtttcacaagggtaccaggtcgtgaaggaattttattaaatctattaaatcatagatagcttttaataagttcaattttactttaagagctaataagttacttgatattaaccnttttacttataaggnaagtgggagatatgacatcataatcttanacatttaaaaaatcctg

SEQ ID NO: 1058 - DNA, 60 bp, Homo sapiens
  misc_feature 32, 46, 53: n = A,T,C or G
cgactcactatagggcgaattgggccctctanatgcatgctcgagncggccanctggatc

SEQ ID NO: 1059 - DNA, 69 bp, Homo sapiens
ctcactatagggcgaattgggccctctagatgcatgctcgagcggccgccctttttttttttttttttt

SEQ ID NO: 1060 - DNA, 72 bp, Homo sapiens
  misc_feature 31, 32: n = A,T,C or G
cgactcactatagggcgaattgggccctctnnatgcatgctcgagcggccgccctttttttttttttttttt

SEQ ID NO: 1061 - DNA, 624 bp, Homo sapiens
  misc_feature 26, 27, 321, 326, 393, 536, 539, 544, 574, 601, 614, 615: n = A,T,C or G
cactatagggcgaattgggccctctnnatgcatgctcgagcggccgccctttttttttttttttgagatcagaattaaattctttaatacaaaatgcttttttttttttaagatatatctgtatttctttgtcgttgtttaaaaataaatatgtactacggaatatctcgaaaaactgcactagagacaaagacgtgatgttaatatcttttccccacaattattacggataaacagtagcaccaataaataaatgataacaaatattaaaattaaaaaaggagagagatttagtatgtagaattctctattttttcttgntttgnttttacatataaaaaacagaatagcaatgtctattttatcagaatcacatatatacataaacatatntatatatatatacacacaaatacaagttgccaaatatatatatagtatgtagatgtatattgaaaccttatttcaaaggaatgtgtgctggggagccaggggatcggggagggcagagctgagtgttagcaaaattaaatatntgntcaanataagctagtgactgtcaccgatcaggganagagagattggaaacatgaattttatnttcaaaaaccggnncaaataaga

SEQ ID NO: 1062 - DNA, 179 bp, Homo sapiens
gcatgctcgagcggccgcgtcgactttttttttttttttttttttttgacttttttaaaatgccatttattggtataaaaaccatttatacattatataaatacaatataaatatttctttaaaaatatgtataagttagccatttatttgaggtaagcctacactttccaagaaatga

SEQ ID NO: 1063 - DNA, 317 bp, Homo sapiens
  misc_feature 75, 240, 272: n = A,T,C or G
agggcgaattgggccctctagatgcatgctcgagcggccgcccttttttttttttttttgggaaagttaccgcanatgattatctgtattttctaattttctacaatgtacaagtaatgcttttgaagtaaggcttatgtttttgaaaagttatggatttaagtcattacttaccagcaaaactttatatgccaagtagctaaaaatcatagttcaactgactttgtggatatttcttanaactatggtcctcaaattgtgagttgctgtanaatggaacttttctgaactattatctcccatccaaatgccatctt

SEQ ID NO: 1064 - DNA, 608 bp, Homo sapiens
  misc_feature 594: n = A,T,C or G
gccaactcacacaaggcaggtgagtgaggaaatccagagttgccatggagaaaaatccagtgtcagcattcttgctccttgtggccctctcctacactctggccagagataccacagtcaaacctggagccaaaaaggacacaaaggactctcgacccaaactgccccagaccctctccagaggttggggtgaccaactcatctggactcagacatatgaagaagctctatataaatccaagacaagcaacaaacccttgatgattattcatcacttggatgagtgcccacacagtcaagctttaaagaaagtgtttgctgaaaataaagaaatccagaaattggcagagcagtttgtcctcctcaatctggtttatgaaacaactgacaaacacctttctcctgatggccagtatgtccccaggattatgtttgttgacccatctctgacagttagagccgatatcactggaagatattcaaaccgtctctatgcttacgaacctgcagatacagctctgttgcttgacaacatgaagaaagctctcaagttgctgaagactgaattgtaagaaaaaaatctccaagcccttntgtctgtcaggcct

SEQ ID NO: 1065 - DNA, 592 bp, Homo sapiens
  misc_feature 571, 589: n = A,T,C or G
gccaactcacacaaggcaggtgagtgaggaaatccagagttgccatggagaaaaatccagtgtcagcattcttgctccttgtggccctctcctacactctggccagagataccacagtcaaacctggagccaaaaaggacacaaaggactctcgacccaaactgccccagaccctctccagaggttggggtgaccaactcatctggactcagacatatgaagaagctctatataaatccaagacaagcaacaaacccttgatgattattcatcacttggatgagtgcccacacagtcaagctttaaagaaagtgtttgctgaaaataaagaaatccagaaattggcagagcagtttgtcctcctcaatctggtttatgaaacaactgacaaacacctttctcctgatggccagtatgtccccaggattatgtttgttgacccatctctgacagttagagccgatatcactggaagatattcaaaccgtctctatgcttacgaacctgcagatacagctctgttgcttgacaacatgaagaaagctctcaagttgctgaagactgaattgtnaagaaaaaaaatctccanccc

SEQ ID NO: 1066 - DNA, 567 bp, Homo sapiens
  misc_feature 110, 206, 241, 268, 301, 318, 352, 452, 468, 481, 484, 488,523, 526, 537, 541: n = A,T,C or G
tgggccctctagatgcatgctcgagcggccgcccttttttttttttttttatttttaaaactttactttaaaaatatgagcatctattttaaaagttttgataattattnccattattttcttgtgattggtacaatttaaaaataagtctatgttttcacattgattttaaaaaatatagcatgtttgaattacaaatgattaancaaactctattacttcatagctgaccatcttccanaaaattcccacttaattgaatacttanaaaaaaatggccagtggccgattgaaaggtatnttaaaattaagggcagntttaattctgaagacaaatatcttcatggaaatntatttgtaagcttctgagattgctgctgaaagtctacagtctgtgaatataccaattcccctttacaactgatgcagatcattatgaaatactggaaggnataccctacaatttangaattggtgtggntgncacntgctatgctctcaattgcacactcatcaattcctntgnggatccgagcncggnaccaagcttggcgtaatcatgggcat

SEQ ID NO: 1067 - DNA, 674 bp, Homo sapiens
  misc_feature 11, 377, 640, 654: n = A,T,C or G
tgggccctctnatgcatgctcgaggggtgtgttcctacttagctttgtacagcccagatgtgatatttctacaggaagttattcccccatattatagctacctaaagaagagatcaagtaattatgagattattacaggtcatgaagaaggatatttcacagctataatgttgaagaaatcaagagtgaaattaaaaagccaagagattattccttttccaagtaccaaaatgatgagaaaccttttatgtgtgcatgtgaatgtgtcaggaaatgagctttgccttatgacatcccatttggagagcaccagagggcatgctgcggaacgaatgaatcagttaaaaatggttttaaagaaaatgcaagaggctccntgagtcagctacagttatatttgcaggagatacaaatctaagggatcgagaggttaccagatgtggtggtttacccaacaacattgtggatgtctgggagtttttgggcaaacctaaacattgccagtatacatgggatacacaaatgaactctaatcttggaataactgctgcttgtaaacttcgttttgatcgaatatttttcagagcagcagcagaagagggacacattattccccgaagtttggaccttcttggattanaaaaactggactgnggtagatttcctagtgatca

SEQ ID NO: 1068 - DNA, 314 bp, Homo sapiens
  misc_feature 37, 61, 118, 132, 134, 135, 151, 170, 212, 273, 287: n = A,T,C or G
gccaactcacacaaggcaggtgagtgaggaaatccanagttgccatggagaaaaatccagngtcagcattcttgctccttgtggccctctcctacactctggccagagataccacagncaaacctggagccnannaggacacaaaggactntcgacccaaactgccccanaccctctccagaggttggggtgaccaactcatctggactcanacatatgaagaagctctatataaatccaagacaagcaacaaacccttgatgattattcatnacttggatgagtgnccacacagtcaagctttaaagaaagtg

SEQ ID NO: 1069 - DNA, 444 bp, Homo sapiens
  misc_feature 17, 156, 233, 292, 378, 408, 420: n = A,T,C or G
agggcgaatgggccctntagatgcatgctcgagcgcatctgcccgccctagtcggggaagagcaggaagccggagaagacgctgtcagagccctggatgcccaccatgtcgtagtagtcattgacagccagccacacctcctcgcccacctgcaanctcagcagcacaccgcccgagttgacctgattggttttggacgtgtggccacagaaggtgaccactttgacgccggntgcggtacagcagcacgcacaggttggctgtatgcgacgcgtggtagacaaagtagtanaggccggggactttgcaggtgaacttgccagtgctcgtgtcataatctccctgcgggttggtgaggaccgcgttgaatctgatcangctgttgggtgcaaggggctggtgggtctnccgagtgaccgngaacactgactggaatttctgctt

SEQ ID NO: 1070 - DNA, 644 bp, Homo sapiens
ctatagggcgaattgggccctctagatgcatgctcgaggggtgtgttcctacttagctttgtacagcccagatgtgatatttctacaggaagttattcccccatattatagctacctaaagaagagatcaagtaattatgagattattacaggtcatgaagaaggatatttcacagctataatgttgaagaaatcaagagtgaaattaaaaagccaagagattattccttttccaagtaccaaaatgatgagaaaccttttatgtgtgcatgtgaatgtgtcaggaaatgagctttgccttatgacatcccatttggagagcaccagagggcatgctgcggaacgaatgaatcagttaaaaatggttttaaagaaaatggaagaggctccagagtcagctacagttatatttgcaggagatacaaatctaagggatcgagaggttaccagatgtggtggtttacccaacaacattgtggatgtctgggagtttttgggcaaacctaaacattgccagtatacatgggatacacaaatgaactctaatcttggaataactgctgcttgtaaacttcgttttgatcgaatatttttcagagcagcagcagaagagggacacattattccccgaagtttggaccttc

SEQ ID NO: 1071 - DNA, 587 bp, Homo sapiens
  misc_feature 26, 67, 77, 159: n = A,T,C or G
cactatagggcgaattgggccctctngatgcatgctcgagcggccgccctttttttttttttttcanattttactgnggaagcatatttaatgcacacatttgaatgttacacataaataattttaacgatggagtccaagttctggattttacattanatctgcatatataagacacttgtggtcaaatttcaagattggtaaagccagtttcaagctgcttatattttgagtacaggtttcactattacaaatatatgatgttaaactaacaaactcatgaccttcaaagatgtcttcgtcccacgcacacacatttgtaatttgtgtccatttgctatttcccttcttctataatcttcaaattatatagttatgcattgagttccctatgcatctcacccatctcctttatctcagccttctcatactttgccattctcttctttctggaaataaccagcacaacaattccagcaacaactgctatcaccacaaccacaataacagcaataacaccagcttttagaccctgcattgagaattcaggtgctttttcatcaacataataaattaaagtttgacca

SEQ ID NO: 1072 - DNA, 563 bp, Homo sapiens
gccaactcacacaaggcaggtgagtgaggaaatccagagttgccatggagaaaaatccagtgtcagcattcttgctccttgtggccctctcctacactctggccagagataccacagtcaaacctggagccaaaaaggacacaaaggactctcgacccaaactgccccagaccctctccagaggttggggtgaccaactcatctggactcagacatatgaagaagctctatataaatccaagacaagcaacaaacccttgatgattattcatcacttggatgagtgcccacacagtcaagctttaaagaaagtgtttgctgaaaataaagaaatccagaaattggcagagcagtttgtcctcctcaatctggtttatgaaacaactgacaaacacctttctcctgatggccagtatgtccccaggattatgtttgttgacccatctctgacagttagagccgatatcactggaagatattcaaaccgtctctatgcttacgaacctgcagatacagctctgttgcttgacaacatgaagaaagctctcaagttgctgaagact

SEQ ID NO: 1073 - DNA, 590 bp, Homo sapiens
  misc_feature 539, 540, 573: n = A,T,C or G
gccaactcacacaaggcaggtgagtgaggaaatccagagttgccatggagaaaaatccagtgtcagcattcttgctccttgtggccctctcctacactctggccagagataccacagtcaaacctggagccaaaaaggacacaaaggactctcgacccaaactgccccagaccctctccagaggttggggtgaccaactcatctggactcagacatatgaagaagctctatataaatccaagacaagcaacaaacccttgatgattattcatcacttggatgagtgcccacacagtcaagctttaaagaaagtgtttgctgaaaataaagaaatccagaaattggcagagcagtttgtcctcctcaatctggtttatgaaacaactgacaaacacctttctcctgatggccagtatgtccccaggattatgtttgttgacccatctctgacagttagagccgatatcactggaagatattcaaaccgtctctatgcttacgaacctgcagatacagctctgttgcttgacaacatgaannaagctctcaagttgctgaagactgaattgtaanaaaaaaatctccaagcc

SEQ ID NO: 1074 - DNA, 554 bp, Homo sapiens
  misc_feature 286, 354, 356, 391, 415, 427, 480, 496, 500, 505, 538: n = A,T,C or G
cactatagggcgaattgggccctctagatgcatgctcgagtgcaagctggaggcagactgagtcctcggatgcttcggccagttctgactctagaggacaatacatacctctcatcaaagtagccagaacggattttactggcatctagatccgtggtgtgcttcattgtccgggggtcatatccattgtgtcgctcttggatcacagggtcaaacaggtcagcaaatacctcataggtctcctcatcttcagccaccatgcccacagtcttgatgaaggggtggncagggttgtccacgccagtctggatacactgatctagcgtccaaccagtgggtgtggtcttgtcgcananccgtgcatagactgctggggtcaggtgactggccntgcagttgttgtgctttcggaggnctgggtactcancgctcgggggatacagcctccgtcgttcactggcagctcgtacaggttccggncggagcagaaacccancggntaganaccccgctccggccaaagccaggaacctgagtncccggcgggcggacag

SEQ ID NO: 1075 - DNA, 672 bp, Homo sapiens
  misc_feature 629: n = A,T,C or G
gccaactcacacaaggcaggtgagtgaggaaatccagagttgccatggagaaaaatccagtgtcagcattcttgctccttgtggccctctcctacactctggccagagataccacagtcaaacctggagccaaaaaggacacaaaggactctcgacccaaactgccccagaccctctccagaggttggggtgaccaactcatctggactcagacatatgaagaagctctatataaatccaagacaagcaacaaacccttgatgattattcatcacttggatgagtgcccacacagtcaagctttaaagaaagtgtttgctgaaaataaagaaatccagaaattggcagagcagtttgtcctcctcaatctggtttatgaaacaactgacaaacacctttctcctgatggccagtatgtccccaggattatgtttgttgacccatctctgacagttagagccgatatcactggaagatattcaaaccgtctctatgcttacgaacctgcagatacagctctgttgcttgacaacatgaagaaagctctcaagttgctgaagactgaattgtaaagaaaaaaaatctccaagcccttctgtctgtcaggccttgagacttgaaaccagaanaagtgtgagaagactggctagtgtggaagcatagtgacacact

SEQ ID NO: 1076 - DNA, 285 bp, Homo sapiens
  misc_feature 11, 12, 71, 114, 123, 137, 146, 154, 175, 177, 185, 205, 221: n = A,T,C or G
tgggccctctnnatgcatgctcgagcggccgcccttttttttttttttttttttttttttttttttttggncttcactggtctttattgaatgagggttgtcaggagcaaaggngggatcaanagcagcaaaagcanaaacaagtntaaaagtntcaaaaaatacaaagtgctancnctgagganagtgaaaagggttgggttgnggcccaaagggacctntgggacacaggattgaggacttgccacagcctccaagggaacctaggcctggggggcctgtgca

SEQ ID NO: 1077 - DNA, 540 bp, Homo sapiens; identical to SEQ ID NO: 447

SEQ ID NO: 1078 - DNA, 518 bp, Homo sapiens
  misc_feature 402, 410, 447, 449, 470, 478: n = A,T,C or G
gccaactcacacaaggcaggtgagtgaggaaatccagagttgccatggagaaaaatccagtgtcagcattcttgctccttgtggccctctcctacactctggccagagataccacagtcaaacctggagccaaaaaggacacaaaggactctcgacccaaactgccccagaccctctccagaggttggggtgaccaactcatctggactcagacatatgaagaagctctatataaatccaagacaagcaacaaacccttgatgattattcatcacttggatgagtgcccacacagtcaagctttaaagaaagtgtttgctgaaaataaagaaatccagaaattggcagagcagtttgtcctcctcaatctggtttatgaaacaactgacaaacacctttctnctgatggncagtatgtccccaggattatgtttgttgacccatctntnacagttagagccgatatcacntggaaganattcaaaccgtctctatgcttacgaacctgcagatacagc

SEQ ID NO: 1079 - DNA, 605 bp, Homo sapiens
  misc_feature 148, 234, 300, 451, 468, 478, 489, 493, 524, 527, 533, 549,551, 562, 573, 579, 592: n = A,T,C or G
cactatagggcgaattgggccctctagatgcatgctcgagcggccgccctttttttttttttttttttttatcctgaagtgatgtttaaattttatttaataaaaatacagttttctttttaaatcaacaaataacattgtttttcanaaatctactcaaatgctgctccttagttatggcttaagagctacccaaagacttcagtgggtaggctgaggggaatagaaatgcanaatccttctttcagtagcctatatacagttatctcctacactcactacacacgtttgggcatgtanaacttgccccagtatttccccttgtgggtcaagtcatatgggctcagtactttccgtatgcccagcatgttggcagtggctattcgctcaaatgtccaggggttctgggtgtacgttctctttcctcttgatcttttcgcatcttctctanagtcccgcgggtcacancctttgctgngaagggcaacnttgngggcaacctggtcaaggaaaccttgcacttnttnaaattnacaacgcccacccatntntacaacaaggngggcagccttnacaggngtcacgtagtggncaatagcaccttt

SEQ ID NO: 1080 - DNA, 582 bp, Homo sapiens
  misc_feature 24, 107, 178, 204, 216, 223, 361, 402, 407, 411, 433, 488,509: n = A,T,C or G
ctatagggcgaattgggccctctnatgcatgctcgagcggccgcccttttttttttttttttttttttttgagacggagtctcgctctgtcgcccaggccggactgnggactgcagtggcgcaatctcggctcactgcaagctccgcttcccgggttcacgccattctcctgcctcancctcccgagtagctgggactacaggngcccgccaccgngcccggntaatattttgtatttttagtagagacggggtttcaccttgttagccaggatggtctcgatctcctgacctcatgatccacccgcctcggcctcccaaagtgctgggattacaggcgtgagccaccgcgcccggccggngacacgcttttaagtacgaacagacaaccaacgattatganaaatntganagaagctactattgtaaaaganatcgaaaatatcgaaaaaagctaactagaataacctaagattatgcagggattanaaaatgccaaaaaacccttanaccccaactattatttacatcctcagataagttacagcaactatgaaataaaagaacgggatactaaaggaag

SEQ ID NO: 1081 - DNA, 136 bp, Homo sapiens
  misc_feature 33: n = A,T,C or G
tgggccctctagatgcatgctcgagcggccgcnacgcccgccgcagctggggcgatccacgggaagggcccggctcgcgtccagagtcgccgccgccgccggccccccgggtgcccgggcccccctcgcgggggac

SEQ ID NO: 1082 - DNA, 713 bp, Homo sapiens
  misc_feature 646: n = A,T,C or G
cactatagggcgaattgggccctctagatgcatgctcgaggaatcgaggggtgaagatggagtcggctgacattttttgccttaaaaatacattaggagtcataagcgtgatgacacatggagtgtagcttcttgcaccactggatcaacagtcatcaatttcatgactcggataaggtccccaggagcctggcagaatgtacatctccctctcccttcagagccttacatataatcttctcatgacgatggcaaacagatatattttaaattacacgtaacaattatacatagtgtatatccagatccgtctgcaggcgaactctgcatcagttccacatataagcctcacgcccccaccaccctgcaatttccccgtcctcggaactgtctcacgagaccaccagcgcacagacacgaacatgcctctcacacaccccagaacgcagctgtgctggagttgggcacaaaggcccctcactccctgtcttcatggtgtgggttcttggctgccaacagaactgtcagcctttattaagaaggaagggtctgtgtaaaaatgggatgtgtaaatcagaagaggggccctggcacagagccaggcaggcttgctttagcattgagtcctgcgtcgcgcaatgcccangaccttgcctgttaagtctgggtggggcccctatggggcatgtccacgtgcccccgaccagactcat

SEQ ID NO: 1083 - DNA, 602 bp, Homo sapiens
cactatagggcgaattgggccctctagatgcatgctcgagagagctacctttttccttttatgtataaggacacagctagaaaatgccatgtatgatccagaggcctaatttgttgatcccttaatcttggacttcccaccattgagaacagcgagaaataaatttctgttgtttataagctgccaagttcatagtatttcattacagcagcctgcacagaccaaggcagtatttttttttaatgtcttctaagggaacccccccaaaagtaaacaaaaatctacaaaagttatttgtatgatcaaaatcaaaacattcttattcacgaaatagaagctacagtaaattttcaaaaaataagagttaaaaaactccccccatatgatatattttacagtttcacaagggtaccaggtcgtgaaggaattttattaaatctattaaatcatagatagcttttaataagttcaattttactttaagagctaataagttacttgatattaacctttttacttataaggtaagtgggagatatgacatcataatcttagacatttaaaaaatcctgagaaagattatttcaatcttttacagtttg

SEQ ID NO: 1084 - DNA, 633 bp, Homo sapiens
  misc_feature 3: n = A,T,C or G
cantatagggcgaattgggccctctagatgcatgctcgaggggtgtgttcctacttagctttgtacagcccagatgtgatatttctacaggaagttattcccccatattatagctacctaaagaagagatcaagtaattatgagattattacaggtcatgaagaaggatatttcacagctataatgttgaagaaatcaagagtgaaattaaaaagccaagagattattccttttccaagtaccaaaatgatgagaaaccttttatgtgtgcatgtgaatgtgtcaggaaatgagctttgccttatgacatcccatttggagagcaccagagggcatgctgcggaacgaatgaatcagttaaaaatggttttaaagaaaatgcaagaggctccagagtcagctacagttatatttgcaggagatacaaatctaagggatcgagaggttaccagatgtggtggtttacccaacaacattgtggatgtctgggagtttttgggcaaacctaaacattgccagtatacatgggatacacaaatgaactctaatcttggaataactgctgcttgtaaacttcgttttgatcgaatatttttcagagcagcagcagaagagggacacattattccccga

SEQ ID NO: 1085 - DNA, 711 bp, Homo sapiens
  misc_feature 2: n = A,T,C or G
cnactcactatagggcgaattgggccctctagatgcatgctcgaggtggtggcagggccgccccctgcagtccggagacgaacgcacggaccgggcctccggaggcaggttcggctggaaggaaccgctctcgcttcgtcctacacttgcgcaaatgtctccgagcttactcacatagcatattggtatatcaaaatgaaatgcaaggaaccaaaaataacataattgaaggcagtaaaagtgaaattaaataggaagatcatcagtcaaggaagacccactggagaggacagaaaatgaagcagtgttttatcatgtgtatttcagcaggtcttcttgaaatttaactaaaaatatgactgctctctcttcagagaactgctcttttcagtaccagttacgtcaaacaaaccagcccctagatgttaactatctgctattcttgatcatacttgggaaaatattattaaatatccttacactaggaatgagaagaaaaaacacctgtcaaaattttatggaatatttttgcatttcactagcattcgttgatcttttacttttggtaaacatttccattatattgtatttcagggattttgtacttttaagcattaggttcactaaataccacatctgcctatttactcaaattatttcctttacttatggctttttgcattatccagtttttcctgacagcttgtatag

SEQ ID NO: 1086 - DNA, 257 bp, Homo sapiens
  misc_feature 4, 34: n = A,T,C or G
tacnactcactatagggcgaattgggccctctanatgcatgctcgagataaaaccatcaagctatggaataccctgggtgtgtgcaaatacactgtccaggatgagagccactcagagtgggtgtcttgtgtccgcttctcgcccaacagcagcaaccctatcatcgtctcctgtggctgggacaagctggtcaaggtatggaacctggctaactgcaagctgaagaccaaccacattggccacacaggctatctga

SEQ ID NO: 1087 - DNA, 548 bp, Homo sapiens; identical to SEQ ID NO: 855

SEQ ID NO: 1088 - DNA, 524 bp, Homo sapiens
  misc_feature 178, 402, 447, 471, 491: n = A,T,C or G
gccaactcacacaaggcaggtgagtgaggaaatccagagttgccatggagaaaaatccagtgtcagcattcttgctccttgtggccctctcctacactctggccagagataccacagtcaaacctggagccaaaaaggacacaaaggactctcgacccaaactgccccagaccctctncagaggttggggtgaccaactcatctggactcagacatatgaagaagctctatataaatccaagacaagcaacaaacccttgatgattattcatcacttggatgagtgcccacacagtcaagctttaaagaaagtgtttgctgaaaataaagaaatccagaaattggcagagcagtttgtcctcctcaatctggtttatgaaacaactgacaaacacctttctnctgatggccagtatgtccccaggattatgtttgttgacccatctntgacagttagagccgatatcactngaagatattcaaaccgtctntatgcttacgaacctgcagatacagctctgttg

SEQ ID NO: 1089 - DNA, 562 bp, Homo sapiens
  misc_feature 83, 223, 309, 367, 406, 412, 424, 435, 462, 524, 547: n = A,T,C or G
ctcactatagggcgaattgggccctctagatgcatgctcgagcggccgcccttttttttttttttttgaagtaattatttaangacacaggaaaataacatgttatgaaacaagctggttacaagtagtaggtagatgacttaatttttgataaaaaaattaaaaagcataaacatgcatataaaaattagattatgtacaaaataccaacagtatttacttntgctcagtaattaaatattcttccctttgtttttgtcttttaaaaaacattatttctgaaaaaaaaaatcagaaaaacatgatcgnggagagaattattaaacaccaggaattaggaacccaagaagctaagccaggagctcancagtcaaggttggaagtccaggacaggtccgaccagggngatggnggccaagcccanaaatggaagantggtcttttcttttcctactggaatgntctttaccagttttctctatattcgatgttagcacacttatttaatgggatccgagctcggnaccaagcttggcgtaatcatggncatagctgtttcctg

SEQ ID NO: 1090 - DNA, 409 bp, Homo sapiens
  misc_feature 23, 228: n = A,T,C or G
ctttttttttttttttgaagaanaaaatcctttattttttgatgagcaaaaataataaattgctgttcacactggataagaccatatcaaaagtgacagtaaacatgtacactgttggtgttatatggggatggggttctcggtaattttgtttattatttatgtttattattatgttttatcattaattattcaataaatttttatttaaaaagtcaccctacttanaaatcttctgtgggggtgggagggacaaaagattacaaaccaaaactcaggagatggtaacactggaattgataaaatcacctgggattagttgtataactctgaaccaccaaacctctgctatcaagccttgctacagtcatggctgtccagaaagatttacagttatttttctgagaaa

SEQ ID NO: 1091 - DNA, 258 bp, Homo sapiens
atacgactcactatagggcgaattgggccctctacatgcatgctcgagataaaaccatcaagctatggaataccctgggtgtgtgcaaatacactgtccaggatgagagccactcagagtgggtgtcttgtgtccgcttctcgcccaacagcagcaaccctatcatcgtctcctgtggctgggacaagctggtcaaggtatggaacctggctaactgcaagctgaagaccaaccacattggccacacaggctatctga

SEQ ID NO: 1092 - DNA, 476 bp, Homo sapiens
  misc_feature 214, 241, 343, 441: n = A,T,C or G
cttttttttttttttttttttttatttttaaaactttattttaaaaatatgagcatctattttaaaagttttgataattattgccattattttcttgtgattggtacaatttaaaaataagtctatgttttcacattgattttaaaaaatatagcatgtttgaattacaaatgattaagcaaactctattacttcatagctgaccatcttccanaaaattcccacttaattgaatacttanaaaaaaatggccagtggccgattgaaaggtatattaaaattaagggcagttttaattctgaagacaaatatcttcatggaaatctatttgtaagcttctganattgctgctgaaagtctacagtctgtgaatataccaattcccctttacaactgatgcagatcattatgaaatactggaaggcataccctacaatttangaattggtgtggctgccactgctatgctctcaatt

SEQ ID NO: 1093 - DNA, 135 bp, Homo sapiens
gccaactcacacaaggcaggtgagtgaggaaatccagagttgccatggagaaaaatccagtgtcagcattcttgctccttgtggccctctcctacactctggccagagataccacagtcaaacctggagccaaaa

SEQ ID NO: 1094 - DNA, 579 bp, Homo sapiens
  misc_feature 29: n = A,T,C or G
ctcactatagggcgaattgggccctctanatgcatgctcgagctccttggcgagcacgtgaccccggcgggcacgcaggagggcaggcaggcccctgcgcaggcgctgggtggactgcttccaggtgtcatattggaagaacttgcccacggggtatctggggaagttgtccggaagcacggtcggaggggtcgacacgtccctctcggacttggcgggggtagcacagtacgtctccaggagggccaggtcacagctgcggaaacagcactcctcaacgatgccacggctgcgacggctcacacggcttgcgggcctgctgaagtagaagccgcggtccccacagacgaactggagggtgtccaccagctccccgccgcacagggtctcactggggcggtaagcagcaatgcagcacgaggcgaaggccaagaaggtgagaagcaccagcatcgacttccccattgggattcccattggtgtagctcagcagaaggctcgctggggcaggaggaggaggaggaagaggaggaggaggaagctggaagtctctttcacaggagaagcgtcgacgcggcc

SEQ ID NO: 1095 - DNA, 426 bp, Homo sapiens
  misc_feature 29: n = A,T,C or G
ctcactatagggcgaattgggccctctanatgcatgctcgagccgtccagctgcggtgggatctgagtatatctagggcgggtgggcgggtagcagtgctgggcctgtgtcttgagcctggagggagtctgctcctgccgccctctgccctgccagagacagacccatgcgctgcctgcccaccgtgcccctttgtccccatgtcaggcggaggcggaaggcccaccgtgccagaggctgggcaccagccttaaccctcactctgctagcacctcctccctttccccaaggtagcacatctggctcactccccactccgtctctggagcccaccagggaaggccctcatcccctgccgctacttctctggggaatgtgggttccatccaggattgggggcctctctgctcacccactctgcaccca

SEQ ID NO: 1096 - DNA, 145 bp, Homo sapiens
  misc_feature 132, 136, 138: n = A,T,C or G
acgactactatagggcgaatgggccctctagatgcatgctcgagcggccgccctttttttttttttttttttttttttttttttttttttttttttttttttttttttttttttttttttttttttttcccnagcnanggggggg

SEQ ID NO: 1097 - DNA, 118 bp, Homo sapiens
  misc_feature 1, 114, 115: n = A,T,C or G
ntatagggcgaattgggccctctagatgcatgctcgagcggccgccctttttttttttttttttttttttttttttttttttttttttttttttttttttttttttttttggcnntaa

SEQ ID NO: 1098 - DNA, 531 bp, Homo sapiens
gccaactcacacaaggcaggtgagtgaggaaatccagagttgccatggagaaaaatccagtgtcagcattcttgctccttgtggccctctcctacactctggccagagataccacagtcaaacctggagccaaaaaggacacaaaggactctcgacccaaactgccccagaccctctccagaggttggggtgaccaactcatctggactcagacatatgaagaagctctatataaatccaagacaagcaacaaacccttgatgattattcatcacttggatgagtgcccacacagtcaagctttaaagaaagtgtttgctgaaaataaagaaatccagaaattggcagagcagtttgtcctcctcaatctggtttatgaaacaactgacaaacacctttctcctgatggccagtatgtccccaggattatgtttgttgacccatctctgacagttagagccgatatcactggaagatattcaaaccgtctctatgcttacgaacctgcagatacagctctgttgcttgaca

SEQ ID NO: 1099 - DNA, 568 bp, Homo sapiens
  misc_feature 222, 270, 299, 311, 463, 480, 485: n = A,T,C or G
attgggccctctagatgcatgctcgagcggccgcccttttttttttttttttttttgagatggagtcttgctctgttgccagactggagtgcagtggtgcgatctgggctcactgcaatctccacctcccgggttcaagcgattctcctgcctcagcctcccgagtaactgggactacaggtgcgcgccaccaagcccagctcatttttgtatttttagtanagatggggtttcacgatgttggctaggatggtctcgatctctggtcanagtcttttctgtaaatatccttggtaaanaagcaattttanactgtagctgttgcaaatgctttaaggaagaagcaaaacaactgtcagtcttcctgaaatgaagaaactacaccagggctgctatatcagagcaaccccaaccagcactccaatcatgatgccgacagtggccccagctgagagaccagganaagttccagatgcaganactgngatgctcttgactatggaattattgcggccagtagccaagttagagacaaaacaggcataggtcccgttattatttggcgtga

SEQ ID NO: 1100 - DNA, 241 bp, Homo sapiens
  misc_feature 30, 31: n = A,T,C or G
gactcactatagggcgaattgggccctctnnatgcatgctcgagctttctccttcttatagacgttccggacgggcatgaccggtccggtcagctgggtggccagtttcagttcttcagcagaactgtctcccttcttgggggccgagggcttcctggggaagaggatgagtttggagcggtactccttcagccgctgcacgttggcctgcagggactccgtggacttgttccgcctcctc

SEQ ID NO: 1101 - DNA, 342 bp, Homo sapiens
  misc_feature 13, 120, 191, 222, 260, 261, 274, 280, 295, 315: n = A,T,C or G
ttgggccctctanatgcatgctcgagcggccgcccttttttttttttttttttttggtttgatgaaatagataattcaggttgtcatttataattttagagtttgcttcacatatacaantgctgtgttaccaaacaatgaacacttttataaaaaatttatttcacacttttatacaaatatccacaggnaatttctaatcatgaaataattttacaattntagttagtacaaaaatgtatcaaatgcaaacagaacanngacttgacttganatgacntttttaacaaccatnaatctaaacaccataacatntttgtttctttgttgaaccaccctccc

SEQ ID NO: 1102 - DNA, 628 bp, Homo sapiens
  misc_feature 29, 247, 379, 521, 617: n = A,T,C or G
ctcactatagggcgaattgggccctctanatgcatgctcgagcggccgcccttttttttttttttttttttttttaaggttgttggaaataatttttatttaacagatataaaaaaaattcttaacatttacaaattgtacaaagattggtagcttttatatttttttaaaaatgctatactaagagaaaaaacaaaagaccacaacaatattccaaattataggttgagagaatgtgactatgaanaaagtattctaaccaactaaaaaaaatattgaaaccacttttgattgaagcaaaatgaataatgctagatttaaaaacagtgtgaaatcacactttggtctgtaaacatatttagctttgcttttcattcanatgtatacataaacttatttaaaatgtcatttaagtgaaccattccaaggcataataaaaaaagaggtagcaaatgaaaattaaagcatttattttggtagttcttcaataatgatgcgagaaactgaattccatccagtanaagcatctccttttgggtaatctgaacaagtgccaacccagatagcaacatccactaatccagcaccaattccttcacaaagtccttccacagaanaagtgcgatga

SEQ ID NO: 1103 - DNA, 519 bp, Homo sapiens
  misc_feature 25: n = A,T,C or G
cactatagggcgaattgggccctcnagatgcatgctcgagcggccgccctttttttttttgcagttatttttaaaactttattttaaaaatatgagcatctattttaaaagttttgataattattgccattattttcttgtgattggtacaatttaaaaataagtctatgttttcacattgattttaaaaaatatagcatgtttgaattacaaatgattaagcaaactctattacttcatagctgaccatcttccagaaaattcccacttaattgaatacttagaaaaaaatggccagtggccgattgaaaggtatattaaaattaagggcagttttaattctgaagacaaatatcttcatggaaatctatttgtaagcttctgagattgctgctgaaagtctacagtctgtgaatataccaattcccctttacaactgatgcagatcattatgaaatactggaaggcataccctacaatttaggaattggtgtggctgccactgctatgctctcaatt

SEQ ID NO: 1104 - DNA, 554 bp, Homo sapiens
  misc_feature 34, 44, 126, 149, 496: n = A,T,C or G
cttttttttttttttttttttttcagtttttcanattttactgnggaagcatatttaatgcacacatttgaatgttacacataaataattttaacgatggagtccaagttctggattttacattanatctgcatatataagacacttgnggtcaaatttcaagattggtaaagccagtttcaagctgcttatattttgagtacaggtttcactattacaaatatatgatgttaaactaacaaactcatgaccttcaaagatgtcttcgtcccacgcacacacatttgtaatttgtgtccatttgctatttcccttcttctataatcttcaaattatatagttatgcattgagttccctatgcatctcacccatctcctttatctcagccttctcatactttgccattctcttctttctggaaataaccagcacaacaattccagcaacaactgctatcaccacaaccacaataacagcaataacaccagcttttanaccctgcattgagaattcaggtgctttttcatcaacataataaattaaagtttgacca

SEQ ID NO: 1105 - DNA, 458 bp, Homo sapiens
  misc_feature 7, 10: n = A,T,C or G
tacgacncantatagggcgaattgggccctctagatgcatgctcgagacacctggggatgagaatgaacatgcccatttccagaaagccaaagagaggcttgaggccaagcaccgagagagaatgtcccaggtcatgagagaatgggaagaggcagaacgtcaagcaaagaacttgcctaaagctgataagaaggcagttatccagcatttccaggagaaagtggaatctttggaacaggaagcagccaacgagagacagcagctggtggagacacacatggccagagtggaagccatgctcaatgaccgccgccgcctggccctggagaactacatcaccgctctgcaggctgttcctcctcggcctcgtcacgtgttcaatatgctaaagaagtatgtccgcgcagaacagaaggacagacagcacaccctaaagcatttcgagcatgtgcgcatg

SEQ ID NO: 1106 - DNA, 263 bp, Homo sapiens
  misc_feature 11, 75: n = A,T,C or G
tgggccctctnatgcatgctcgagcggccgccctttttttttttttttttacttttaaacttgtctctaacttanaaaattttttctaaatgtatcgattagtgtaaagaaaaagtatgagtagttaataaatctgacctattatacaagaaatgcaattttgaaataccagattttcattttttgtactaagtgtatctcattgtaggcaataaaaaattgcatcacaggcatcaaaagtgggaaaaaatgtcgacgcggcc

SEQ ID NO: 1107 - DNA, 465 bp, Homo sapiens
  misc_feature 338, 373, 419, 427, 432, 449: n = A,T,C or G
gccaactcacacaaggcaggtgagtgaggaaatccagagttgccatggagaaaaatccagtgtcagcattcttgctccttgtggccctctcctacactctggccagagataccacagtcaaacctggagccaaaaaggacacaaaggactctcgacccaaactgccccagaccctctccagaggttggggtgaccaactcatctggactcagacatatgaagaagctctatataaatccaagacaagcaacaaacccttgatgattattcatcacttggatgagtgcccacacagtcaagctttaaagaaagtgtttgctgaaaataaagaaatccanaaattggcagagcagtttgtcctcctcaatctggnttatgaaacaactgacaaacacctttctcctgatggccagtatgtncccaggantatgnttgttgacccatctctnacagttagagccgata

SEQ ID NO: 1108 - DNA, 74 bp, Homo sapiens
gccctctagatgcatgctcgagcggccgcccttttttttttttttttttttttttttttttttttttttttttt

SEQ ID NO: 1109 - DNA, 525 bp, Homo sapiens
  misc_feature 37, 105, 117, 151, 176, 297, 300, 335, 338, 501: n = A,T,C or G
gccaactcacacaaggcaggtgagtgaggaaatccanagttgccatggagaaaaatccagtgtcagcattcttgctccttgtggccctctcctacactctggccngagataccacantcaaacctggagccaaaaaggacacaaaggactntcgacccaaactgccccagaccctntccagaggttggggtgaccaactcatctggactcagacatatgaagaagctctatataaatccaagacaagcaacaaacccttgatgattattcatcacttggatgagtgcccacacagtnaanctttaaagaaagtgtttgctgaaaataaagaaatncanaaattggcagagcagtttgtcctcctcaatctggtttatgaaacaactgacaaacacctttctcctgatggccagtatgtccccaggattatgtttgttgacccatctctgacagttagagccgatatcactggaagatattcaaaccgtctctatgcttacnaacctgcagatacagctctgttgc

SEQ ID NO: 1110 - DNA, 646 bp, Homo sapiens
  misc_feature 27, 598: n = A,T,C or G
cactatagggcgaattgggccctctanatgcatgctcgagcggccgcccttttttttttttttttagttatagagctaattggcttttatttgtgatttatgaattaaagcagcaccactctacaagtacagtgatagctccccctgggcaatacaatacaagaacagtgggttttgtcaaattggaacaaggaaacagaaccacagaaataaatacattggttaacatcagattagttcaggttacttttttgtaaaagttaaagtagaggggacttctgtattatgctaactcaagtagactggaatctcctgtgttctttttttttttaaattggttttaattttttttaattggatctatcttcttccttaacatttcagttggagtatgtagcatttagcaccactggctcaatgcgctcacctaggtgagagtgtgaccaaatcttaaagcattagtgctattatcagttaccaccatttggggcttttatccttcatgggttatgatgttctcctgatgacacatttctctgagttttgtaattccagccaaagagagaccattcactatttgatggctggctgcatgcanacatttaaagcttttagagaatacactacaccagggagtatgactact

SEQ ID NO: 1111 - DNA, 630 bp, Homo sapiens
  misc_feature 26, 27, 290: n = A,T,C or G
cactatagggcgaattgggccctctnnatgcatgctcgagcggccgccctttttttttttttttttttttactttgacaacaaattatattttaaatgtttcatatttacttttatatttccatacaatcagaaacagtaaaaaaaatttggagagcacataaaaacatcttaaagttaaaaatataaagccttgtatttaaaaatgcagtcatttaaataatattataagaatctatttgtacataataaacaagtttcaaccagcaagaaattactaatattgactgnggagttttggctgttttaatagttctaactcattattccgtaattcaacacagcactaccaacacagctggcaatgacaagactgggagtatcaaactaggattgttagttcaattaaaatttcagataaacaataatgtacttatactaaaaaattatttgttgtttatctgaaatgaaaatttaactgggtacccaattgtttgtttgtttaatctaaaaaccctgattgaaatttatctaataaaacatcatttaatatctaaaataaaataaatttactataacatctttataactattcaatcaatgattcatcttctatttttccaaattcttg

SEQ ID NO: 1112 - DNA, 639 bp, Homo sapiens
  misc_feature 11, 245, 549, 562, 588: n = A,T,C or G
tgggccctctnatgcatgctcgagcggccgcccttttttttttttttttttacattttttggttcattctgtatcaatgagcagttgtgatatgacagttatgtgtgaattcatctataacagtggattttggggaaatgaataggccaaaaaggaagatattctccaaaactcttaaaatttaaaggttgcagtaggatgctactccagctaattttaagctagccctcctgtattcttacagntatttctctctctctttctttcacacacatgtactcattttcttattctattttataacaatttccccttatgctgacttcgaaaacttattatcttaaaaaatcttattgcatgcattcctgtaagcagctacctcaaacgctttttgagccaggctgaaaataaataaagccaaatttaaaaaaacaaaaacaaaaaacactccaaatcttgccaaactgatgaatcaaatgttttttgattggattttctttaacctttatctatatgaatacataatttacacatatttatagtcaaggngtttgggtaaaanaacaaaaaatgatttatcctctttcnaagaagaggactacaaaaggactgaaaaatactttgggaggccccaggtcc

SEQ ID NO: 1113 - DNA, 622 bp, Homo sapiens
  misc_feature 521: n = A,T,C or G
cactatagggcgaattgggccctctagatgcatgctcgagcaccgtcattaccccgagcacctgcagccccaggaagtcctggccgtcctcgctcaccaggagcccctcttggacccatgggtccaggagctccattttcgcctggaagaccattttcaccctttaatccaggagcacctgtttcacccttttctccatttcgtccatcgaagcctctgtgtcctttcataccagggaatccaggtatcccagctggacctttgatacctggaggtccaggcaatcctcgctctccaggtcgtccgggtctacctgattctccatcttttccagcaggaccagatggacctatagcaccaggaggtcctggagggcctgaaggaccagcttgcccaggttcaccagggggtccttggtatcctggagatccaggggaaccaggatgaccagatgtaccagggggaccgggagggcctggggggccagctggtccaggatagcctgcgagtcctcctactgntactccagacttgacatcatatgaatcatactggggagaatagttctgaggaccagtagggcatgattcacagattccaggggggccaggagaaccagggg

SEQ ID NO: 1114 - DNA, 630 bp, Homo sapiens
  misc_feature 29, 491, 495: n = A,T,C or G
ctcactatagggcgaattgggccctctanatgcatgctcgagcggccgccctttttttttttttttttactttgacaacaaattatattttaaatgtttcatatttacttttatatttccatacaatcagaaacagtaaaaaaaatttggagagcacataaaaacatcttaaagttaaaaatataaagccttgtatttaaaaatgcagtcatttaaataatattataagaatctatttgtacataataaacaagtttcaaccagcaagaaattactaatattgactgtggagttttggctgttttaatagttctaactcattattccgtaattcaacacagcactaccaacacagctggcaatgacaagactgggagtatcaaactaggattgttagttcaattaaaatttcagataaacaataatgtacttatactaaaaaattatttgttgtttatctgaaatgaaaatttaactgggtacccaattgnttgnttgtttaatctaaaaaccctgattgaaatttatctaataaaacatcatttaatatctaaaataaaataaatttactataacatctttataactattcaatcaatgattcatcttctatttttccaaattcttgca

SEQ ID NO: 1115 - DNA, 222 bp, Homo sapiens; identical to SEQ ID NO: 1034

SEQ ID NO: 1116 - DNA, 548 bp, Homo sapiens; identical to SEQ ID NO: 855

SEQ ID NO: 1117 - DNA, 563 bp, Homo sapiens
  misc_feature 539: n = A,T,C or G
gccaactcacacaaggcaggtgagtgaggaaatccagagttgccatggagaaaaatccagtgtcagcattcttgctccttgtggccctctcctacactctggccagagataccacagtcaaacctggagccaaaaaggacacaaaggactctcgacccaaactgccccagaccctctccagaggttggggtgaccaactcatctggactcagacatatgaagaagctctatataaatccaagacaagcaacaaacccttgatgattattcatcacttggatgagtgcccacacagtcaagctttaaagaaagtgtttgctgaaaataaagaaatccagaaattggcagagcagtttgtcctcctcaatctggtttatgaaacaactgacaaacacctttctcctgatggccagtatgtccccaggattatgtttgttgacccatctctgacagttagagccgatatcactggaagatattcaaaccgtctctatgcttacgaacctgcagatacagctctgttgcttgacaacatgaanaaagctctcaagttgctgaagact

SEQ ID NO: 1118 - DNA, 574 bp, Homo sapiens
  misc_feature 26, 27, 228, 403: n = A,T,C or G
cactatagggcgaattgggccctctnnatgcatgctcgagcggccgccctttttttttttttttcttggatacattactgtttattgtttcaagtggatggaatatataaatcccactgagtagtttagtgtggccttgtatcttttataaacaggttaaatggagactttacactgtaatctgtgtatttatctgtctaccataaattgtcttcatgacaaatgcanaatttcttttattacttggctcaaattaactgttgatccttttcactgataatatacaagggtaaaaaagcaggaagcctttaaaattgaaaaaagaaataagatattttccactaaattactgaaaattgaaatttttatgttgactgttgatgactgaaaagccaatgttaanaatcaatatcatccaatataaaatagtacattgaattatttaataaacagaatattaagagcttgtatatgctgactgggaacagtggtggctttttaaattctcagaaagtttaaacattttataattagaagaaaccactggtgatgatgaagatggtccatcactgta

SEQ ID NO: 1119 - DNA, 618 bp, Homo sapiens
gccaactcacacaaggcaggtgagtgaggaaatccagagttgccatggagaaaaatccagtgtcagcattcttgctccttgtggccctctcctacactctggccagagataccacagtcaaacctggagccaaaaaggacacaaaggactctcgacccaaactgccccagaccctctccagaggttggggtgaccaactcatctggactcagacatatgaagaagctctatataaatccaagacaagcaacaaacccttgatgattattcatcacttggatgagtgcccacacagtcaagctttaaagaaagtgtttgctgaaaataaagaaatccagaaattggcagagcagtttgtcctcctcaatctggtttatgaaacaactgacaaacacctttctcctgatggccagtatgtccccaggattatgtttgttgacccatctctgacagttagagccgatatcactggaagatattcaaaccgtctctatgcttacgaacctgcagatacagctctgttgcttgacaacatgaagaaagctctcaagttgctgaagactgaattgtaaagaaaaaaaatctccaagcccttctgtctgtcaggccttgagactt

SEQ ID NO: 1120 - DNA, 222 bp, Homo sapiens
  misc_feature 66, 95, 141, 157, 162, 215: n = A,T,C or G
atgcatgctcgagcggccgcccttttttttttttttttttttttgcaggctctaattttactgcanaaacgggttggctgaagggaacaggccancgaggtgggctcaggacacccccaacagccaggatgggggcacggnaggatctggcgcccanaagtnagagggaggcccaggaaatttgcgccagttttcctgccttgtgggtgcctgangagccct

SEQ ID NO: 1121 - DNA, 586 bp, Homo sapiens
  misc_feature 29, 396, 437, 449: n = A,T,C or G
ctcactatagggcgaattgggccctctanatgcatgctcgagaagtaattatcagttggtttggatttttggaccaccgttcagtcattttgggttgccgtgctcccaaaacattttaaatgaaagtattggcattcaaaaagacagcagacaaaatgaaagaaaatgagagcagaaagtaagcatttccagcctatctaatttctttagttttctatttgcctccagtgcagtccatttcctaatgtataccagcctactgtactatttaaaatgctcaatttcagcaccgatggccatgtaaataagatgatttaatgttgattttaatcctgtatataaaataaaaagtcacaatgagtttgggcatatttaatgatgattatggagccttanaggtctttaatcattggttcggctgcttttatgtagtttangctggaaatggnttcacttgctctttgactgtcagcaagactgaagatggcttttcctggacagctagaaaacacaaaatcttgtaggtcattgcacctatctcagccataggtgcagtttgcttctacatgatgctaaaggctgcgaa

SEQ ID NO: 1122 - DNA, 122 bp, Homo sapiens
  misc_feature 105, 108, 109: n = A,T,C or G
catgctcgagcggccgccctttttttttttttttaaacaaatagcttaagtattttatttgtttgcaactaagcttgttaacactatataatgaaaatgtcaaanatnngtgagtttttggt

SEQ ID NO: 1123 - DNA, 525 bp, Homo sapiens
  misc_feature 66, 73, 117, 119, 170, 353, 354, 369, 436, 491: n = A,T,C or G
gccaactcacacaaggcaggtgagtgaggaaatccagagttgccatggagaaaaatccagtgtcancattctngctccttgtggccctctcctacactctggccagagataccacantnaaacctggagccaaaaaggacacaaaggactctcgacccaaactgccccanaccctctccagaggttggggtgaccaactcatctggactcagacatatgaagaagctctatataaatccaagacaagcaacaaacccttgatgattattcatcacttggatgagtgcccacacagtcaagctttaaagaaagtgtttgctgaaaataaagaaatccagaaattggcagagcannttgtcctcctcaatntggtttatgaaacaactgacaaacacctttctcctgatggccagtatgtccccaggattatgtttgntgacccatctctgacagttagagccgatatcactggaagatattcaaaccgtctntatgcttacgaacctgcagatacagctctgttgc

SEQ ID NO: 1124 - DNA, 585 bp, Homo sapiens
  misc_feature 11, 468, 470: n = A,T,C or G
tgggccctctnatgcatgctcgagcggccgccctttttttttttttttacactcagattgtttatttaaaaatgcccaaaacacaaaaatagacttttaaggtaataatatatattactaaatatattatagtctacttataataattatatcgtcgttttcaatattacaaaaaaaggaagaaaaatacaagggaagcagacgacccaatatatataaatactataaaatcatattagaataaataaagtcgtcataaataaagggcccattgatttatgggtggggtttggcaacggctttggctacttgcttttggagggtaatttgagcaccaggattccccctcaggagaggttccagttaccaggagacactggaacctcaggtctataaaaactggaggggcagtgaaggcctattattcacagcacataagattctaggagacagatttgggcagggaanangtgggggagagggttcattgcctcccttaaatatgctacaattttttttcccccaagaacctcggaagacactccatcccccaccatcatgaatactgagcttgcacacttgggg

SEQ ID NO: 1125 - DNA, 241 bp, Homo sapiens
agggcgaatgggccctctagatgcatgctcgagtgatgtgggcgattgatgaaaaggcggttgaggcgtctggtgagtagtgcatggctaggaatagtcctgtggtgatttggaggatcaggcaggcgccaaggagtgagccgaagtttcatcatgcggagatgttggatggggtggggaggtcgatgaatgagtggttaattaattttattagggggctaattttgcggtcgacgcggcc

SEQ ID NO: 1126 - DNA, 595 bp, Homo sapiens
  misc_feature 65: n = A,T,C or G
tgggccctctagatgcatgctcgagcggccgccctttttttttttttttaatagcttaagtattntatttgtttgcaactaagcttgttaacactatataatgaaaatgtacaaagaataatgttgcagtttttggttagatttaagtcaaagacattcattaataaggaatcttcgaatgtgaatattccagaaatttctctaagccatctgatcacaacaactgtctctgaatattaccttactttggaaggtattggcatacatttgaattaaactcagaatttttcaaaataagccctaattaaaaaaactattctatattcaaagtaaaacaatattaatagaactttcctttccagaaacaatgaaggaaacaaggcattttgtaaaatgtggtcctgaacaagtcacagtaaaaaataaatgtatacttaacttccacctcctcaaaacagaggctactttctgttcctcagccttggaaacaaggtgaagaacagcctatatgcgacttcgggcagggggttgccaaaacaaagctgaagcagttgaccatggacacctcaaaagaatttgggagaacccgaccaaa

SEQ ID NO: 1127 - DNA, 138 bp, Homo sapiens
  misc_feature 73: n = A,T,C or G
agggcgattgggccctctagatgcatgctcgagcggccgcccttttttttttttttttttttttttttttttnttttttttttttttttttttttttttttttttttttttttatttttttttttttttttttttttt

SEQ ID NO: 1128 - DNA, 636 bp, Homo sapiens
  misc_feature 171, 182, 194, 208, 338, 340, 430, 439, 458, 462, 495, 496,497, 500, 555, 564, 602: n = A,T,C or G
cgactaatatagggcgaattgggccctctagatgcatgctcgagcggccgccctttttttttttttttttttttttttttttttactggggaagcatatttaatgcacacatttgaatgttacacataaataattttaacgatggagtccaagttctggattttacattanatctgcatatntaagacacttgnggtcaaatttcaanattggtaaagccagtttcaagctgcttatattttgagtacaggtttcactattacaaatatatgatgttaaactaacaaactcatgaccttcaaagatgtcttcgtcccacgcccccccatttgtaattngngtccatttgctatttcccttcttctataatcttcaaattatatagttatgcattgagttccctatgcatctcacccatctcctttatctnagccttctnatactttgccattctcttntttntggaaataaccagcacaacaattccagcaacannntgntttcaccacaaccacaataacagcaataacaccagcttttaaaccctgcattganaattcaggngctttttcatcaacataataaattaaagtttgaccagnatccgagctcggtaccaagcttggcgtaatcatg

SEQ ID NO: 1129 - DNA, 494 bp, Homo sapiens
  misc_feature 2, 18, 82, 242: n = A,T,C or G
cnactcatatagggcgantgggccctctagatgcatgctcgagcggccgccctttttttttttttttggctctagagggggnagagggggtgctatagggtaaatacgggccctatttcaaagatttttaggggaattaattctaggacgatgggcatgaaactgtggtttgctccacagatttcagagcattgaccgtagtatacccccggtcgtgtagcggtgaaagtggtttggtttanacgtccgggaattgcatctgtttttaagcctaatgtggggacagctcatgagtgcaagacgtcttgtgatgtaattattatacgaatgggggcttcaatcgggagtactactcgattgtcaacgtcaaggagtcgcaggtcgcctggttctaggcataatgggggaagtatgtaggagttgaagattagtccgccgtagtcggtgtactcgtaggttcagtaccattggtggccaattgatttgatggtaag

SEQ ID NO: 1130 - DNA, 556 bp, Homo sapiens; identical to SEQ ID NO: 896

SEQ ID NO: 1131 - DNA, 659 bp, Homo sapiens
  misc_feature 6, 109, 137, 178, 190, 205, 251, 302, 378, 391, 401, 436,451, 481, 504, 515, 517, 658: n = A,T,C or G
cgactnatatagggcgaattgggccctctagatgcatgctcgagcggccgccctttttttttttttttttttttttttttttttttttttactttgacaacaaattatnttttaaatgtttcatatttacttttatntttccatacaatcagaaacagtaaaaaaaatttggagagcncataaaaacatnttaaagttaaaaatntaaagccttgtatttaaaaatgcagtcatttaaataatattataanaatctatttgtacataataaacaagtttcaaccagcaagaaattactaatnttgactggggagttttggctgttttaatagttctaactcattattccgtaattcaacacagcactaccaacacagntggcaatgacaanactgggagtntcaaactaggattgttagttcaattaaaatttcanataaacaataatgtncttatactaaaaaattatttgttgtttatntgaaatgaaaatttaactgggtncccaattgttngnttgtttaatctaaaaaccctgattgaaatttatctaataaaacatcatttaatatctaaaataaaataaatttactataacatctttataactattcaatcaatgattcatcttctatttttccaaattcttgcccaaatnt

SEQ ID NO: 1132 - DNA, 628 bp, Homo sapiens
  misc_feature 219, 592: n = A,T,C or G
gccaactcacacaaggcaggtgagtgaggaaatccagagttgccatggagaaaaatccagtgtcagcattcttgctccttgtggccctctcctacactctggccagagataccacagtcaaacctggagccaaaaaggacacaaaggactctcgacccaaactgccccagaccctctccagaggttggggtgaccaactcatctggactcagacatatnaagaagctctatataaatccaagacaagcaacaaacccttgatgattattcatcacttggatgagtgcccacacagtcaagctttaaagaaagtgtttgctgaaaataaagaaatccagaaattggcagagcagtttgtcctcctcaatctggtttatgaaacaactgacaaacacctttctcctgatggccagtatgtccccaggattatgtttgttgacccatctctgacagttagagccgatatcactggaagatattcaaaccgtctctatgcttacgaacctgcagatacagctctgttgcttgacaacatgaagaaagctctcaagttgctgaagactgaattgtaaagaaaaaaatctccaagccnttctgtctgtcaggccttgagacttgaaaccagaag

SEQ ID NO: 1133 - DNA, 623 bp, Homo sapiens
gccaactcacacaaggcaggtgagtgaggaaatccagagttgccatggagaaaaatccagtgtcagcattcttgctccttgtggccctctcctacactctggccagagataccacagtcaaacctggagccaaaaaggacacaaaggactctcgacccaaactgccccagaccctctccagaggttggggtgaccaactcatctggactcagacatatgaagaagctctatataaatccaagacaagcaacaaacccttgatgattattcatcacttggatgagtgcccacacagtcaagctttaaagaaagtgtttgctgaaaataaagaaatccagaaattggcagagcagtttgtcctcctcaatctggtttatgaaacaactgacaaacacctttctcctgatggccagtatgtccccaggattatgtttgttgacccatctctgacagttagagccgatatcactggaagatattcaaaccgtctctatgcttacgaacctgcagatacagctctgttgcttgacaacatgaagaaagctctcaagttgctgaagactgaattgtaaagaaaaaaatctccaagcccttctgtctgtcaggccttgagacttgaaacc

SEQ ID NO: 1134 - DNA, 69 bp, Homo sapiens
gggccctctagatgcatgctcgagcggccgccctttttttttttttttttttttttttttttttttttt

SEQ ID NO: 1135 - DNA, 424 bp, Homo sapiens
  misc_feature 191, 364, 423: n = A,T,C or G
tccaggactgaagacgaaccttggccgcagtccttgcgaactgttcgcaaaacagtgcgggctgcggtgggtcagcgtcacatgctaatgacaggatgttcctcgtagctttttattttgtgcgtcttatgtttgtatagtgtgttgtcattttgattttttttttttttttaagtataaaagctgcttanaatagttctatcatgaagggcacttttcagattgtgggctggaaagggttattttatctgtgggggagggagggagacgtgaagcctatttaaaatgagcctgtgacgattatgcacatgaccagaggcggccggtaatcagggcagagtctggtgtggaccgccgggcgcanagcggctccgcggcgggagctgagcggaaggcgcgggctgcgatctgctctctgttccnc

SEQ ID NO: 1136 - DNA, 440 bp, Homo sapiens
atacgactcactatagggcgaattgggccctctagatgcatgctcgagtgaggccaagtagactcgatcccgctccactaggtctgccaggaggttcagcagccggccccgctcagaggcatccatccggcgccatggggaccccaggcggaaggcttcccgggctgctttcacggcccgatccacatcagcccggtcaccttcagccacgtgcccgatgacctccccggtggtagggttgaccgtcgggaaggtcttcttgctgactgcatcttgccattcattgttgatgaacagctggttgtaggggatgtctgggttcagaatggggcttgggagggctgctgccgaggagtagcgggcggtcctgccctggaggctaagcagccggggtgccaggaagcgcagcatgctgacactctgcagcaggctcgggctac

SEQ ID NO: 1137 - DNA, 577 bp, Homo sapiens
ctcactatagggcgaattgggccctctagatgcatgctcgagctccttggcgagcacgtgaccccggcgggcacgcaggagggcaggcaggcccctgcgcaggcgctgggtggactgcttccaggtgtcatattggaagaacttgcccacggggtatctggggaagttgtccggaagcacggtcggaggggtcgacacgtccctctcggacttggcgggggtagcacagtacgtctccaggagggccaggtcacagctgcggaaacagcactcctcaacgatgccacggctgcgacggctcacacggcttgcgggcctgctgaagtagaagccgcggtccccacagacgaactggagggtgtccaccagctccccgccgcacagggtctcactggggcggtaagcagcaatgcagcacgaggcgaaggccaagaaggtgagaagcaccagcatcgacttccccattgggattcccattggtgtagctcagcagaaggctcgctggggcaggaggaggaggaggaagaggaggaggaggaagctggaagtctctttcacaggagaagcgtcgacgcgg

SEQ ID NO: 1138 - DNA, 488 bp, Homo sapiens
  misc_feature 2, 32, 145, 287: n = A,T,C or G
cnactcactatagggcgaattgggccctctanatgcatgctcgagcggccgcccttttttttttttttttcaagtatcacaatgtttattgatagatacaagtatataaaatcagggcatgaacatgacttgataaattaagtanacttaatttcaatactataataggagggaccaattcaaattctcaccatttgtttcacacccacaaaaaccacttcaagggcattaacgatctctcaaaactgatcagttttgtgcaagtaaaccatgtttcttttaaaaanacttgtgcacttgcccaggctcaaggatattaaaatctagcacataaagcccattactagaggtagaaatacaggcaatatactattacggcaacaaccatcaattacagttaaaaatttttctgtaacaaccaaatggataatcaaatattgcaacaactcaagtattactgagcaaagtgcatttctacagtattcagt

SEQ ID NO: 1139 - DNA, 377 bp, Homo sapiens
  misc_feature 2: n = A,T,C or G
cnactcatatagggcgaattgggccctctacatgcatgctcgagtgggtgctaggaccaaggcctgggtggcttttagatctaattcaatctgctgcagaattgatatggcaaatgtggccgttttcccagtcccagattgggcttgagcaatcacatcataacccttgatacaaggtagaatggctcgctgctggatggcagagggcttctcaaaaccataggcgtagatgccacggagaagggactccgagaggttcatgtcatcaaagctgtcaacaatctcattccagttactctcgatgacgccttcgggctccatcccatcggggccattgtctctggatcgggaatcctggctcgcaggtcgacgcggcc

SEQ ID NO: 1140 - DNA, 570 bp, Homo sapiens
gccaactcacacaaggcaggtgagtgaggaaatccagagttgccatggagaaaaatccagtgtcagcattcttgctccttgtggccctctcctacactctggccagagataccacagtcaaacctggagccaaaaaggacacaaaggactctcgacccaaactgccccagaccctctccagaggttggggtgaccaactcatctggactcagacatatgaagaagctctatataaatccaagacaagcaacaaacccttgatgattattcatcacttggatgagtgcccacacagtcaagctttaaagaaagtgtttgctgaaaataaagaaatccagaaattggcagagcagtttgtcctcctcaatctggtttatgaaacaactgacaaacacctttctcctgatggccagtatgtccccaggattatgtttgttgacccatctctgacagttagagccgatatcactggaagatattcaaaccgtctctatgcttacgaacctgcagatacagctctgttgcttgacaacatgaagaaagctctcaagttgctgaagactgaattgt

SEQ ID NO: 1141 - DNA, 541 bp, Homo sapiens
  misc_feature 187, 340: n = A,T,C or G
cttttttttttttttttttttgagatggagtcttgctctgttgccagactggagtgcagtggtgcgatctgggctcactgcaatctccacctcccgggttcaagcgattctcctgcctcagcctcccgagtaactgggactacaggtgcgcgccaccaagcccagctcatttttgtatttttagtanagatggggtttcacgatgttggctaggatggtctcgatctctggtcagagtcttttctgtaaatatccttggtaaagaagcaattttagactgtagctgttgcaaatgctttaaggaagaagcaaaacaactgtcagtcttcctgaaatgaanaaactacaccagggctgctatatcagagcaaccccaaccagcactccaatcatgatgccgacagtggccccagctgagagaccaggagaagttccagatgcagagactgtgatgctcttgactatggaattattgcggccagtagccaagttagagacaaaacaggcataggtcccgttattatttggcgtgattttggcg

SEQ ID NO: 1142 - DNA, 564 bp, Homo sapiens
gccaactcacacaaggcaggtgagtgaggaaatccagagttgccatggagaaaaatccagtgtcagcattcttgctccttgtggccctctcctacactctggccagagataccacagtcaaacctggagccaaaaaggacacaaaggactctcgacccaaactgccccagaccctctccagaggttggggtgaccaactcatctggactcagacatatgaagaagctctatataaatccaagacaagcaacaaacccttgatgattattcatcacttggatgagtgcccacacagtcaagctttaaagaaagtgtttgctgaaaataaagaaatccagaaattggcagagcagtttgtcctcctcaatctggtttatgaaacaactgacaaacacctttctcctgatggccagtatgtccccaggattatgtttgttgacccatctctgacagttagagccgatatcactggaagatattcaaaccgtctctatgcttacgaacctgcagatacagctctgttgcttgacaacatgaagaaagctctcaagttgctgaagactg

SEQ ID NO: 1143 - DNA, 548 bp, Homo sapiens; identical to SEQ ID NO: 855

SEQ ID NO: 1144 - DNA, 650 bp, Homo sapiens
gccaactcacacaaggcaggtgagtgaggaaatccagagttgccatggagaaaaatccagtgtcagcattcttgctccttgtggccctctcctacactctggccagagataccacagtcaaacctggagccaaaaaggacacaaaggactctcgacccaaactgccccagaccctctccagaggttggggtgaccaactcatctggactcagacatatgaagaagctctatataaatccaagacaagcaacaaacccttgatgattattcatcacttggatgagtgcccacacagtcaagctttaaagaaagtgtttgctgaaaataaagaaatccagaaattggcagagcagtttgtcctcctcaatctggtttatgaaacaactgacaaacacctttctcctgatggccagtatgtccccaggattatgtttgttgacccatctctgacagttagagccgatatcactggaagatattcaaaccgtctctatgcttacgaacctgcagatacagctctgttgcttgacaacatgaagaaagctctcaagttgctgaagactgaattgtaaagaaaaaaatctccaagcccttctgtctgtcaggccttgagacttgaaaccagaagaagtgtgagaagactggctagt

SEQ ID NO: 1145 - DNA, 144 bp, Homo sapiens
  misc_feature 112: n = A,T,C or G
agcatgctcgagcggccgcccttttttttttttttttttttggtttgatgataatagataattcaggttgtcatttataattttagagtttgcttcacatatacaatgctgngttacgaaacaatgaacacttttataaaaaat

SEQ ID NO: 1146 - DNA, 624 bp, Homo sapiens
ctcactatagggcgaattgggccctctagatgcatgctcgagtctttaatataaccccaaatgaaagaaccaaggggaggggtgggatggcacttttttttgttggtcttgttttgttttgttttttggttggttggttcgttattttttaagattagccattctctgctgctatttccctacataatgtcaatttttaaccataattttgacatgattgagatgtacttgaggcttttttgttttaattgagaaaagactttgcaattttttttttaggatgagcctctcctagacttgacctagaatattacatattcctccagtaagtaatactgaagagcaaaagagaggcaggattggggtcacagccgcttcttcagcatggaccaagtgggccttggggattgcagcgttctcgaagtggctgtaggactcgaatttacagaaagccacagaggtgcaacttgaggctctgctagcaagccaccagtgaggctattgggtaaccacctttctatacaggagattggaatctactttgtcatttatccaccacagtgacaaaggaaaagtggtgccgttatgcaatccatttaactcataaacatattactctgagta

SEQ ID NO: 1147 - DNA, 629 bp, Homo sapiens
  misc_feature 597, 614: n = A,T,C or G
cgactcatatagggcgaattgggccctctagatgcatgctcgagcggccgccctttttttttttttttttagagctaattggcttttatttgtgatttatgaattaaagcagcaccactctacaagtacagtgatagctccccctgggcaatacaatacaagaacagtgggttttgtcaaattggaacaaggaaacagaaccacagaaataaatacattggttaacatcagattagttcaggttacttttttgtaaaagttaaagtagaggggacttctgtattatgctaactcaagtagactggaatctcctgtgttctttttttttttaaattggttttaattttttttaattggatctatcttcttccttaacatttcagttggagtatgtagcatttagcaccactggctcaatgcgctcacctaggtgagagtgtgaccaaatcttaaagcattagtgctattatcagttaccaccatttggggcttttatccttcatgggttatgatgttctcctgatgacacatttctctgagttttgtaattccagccaaagagagaccattcactatttgatggctggctggctgcanacatttaaagcttttanagaatacactacacc

SEQ ID NO: 1148 - DNA, 540 bp, Homo sapiens; identical to SEQ ID NO: 447

SEQ ID NO: 1149 - DNA, 579 bp, Homo sapiens
  misc_feature 34: n = A,T,C or G
tacgactcactatagggcgaattgggccctctanatgcatgctcgagcagctgagagccctcttaaagggcaagtgacatcgagacctgctctcggaactgtctgcaggaagactggtgttagactaggattgaagatgaagcacatcttgaagtttactgatctctgccatcggatgctgggtgaggtacagctcattcatgccttccttggctcatgcttaaaacccatcacactcctatcctcccatagttctgcacgtttctcatccactcgggcagctaagagccctcttaaagggcaagcgaccctgacacctgctttaggaactgtttgcaggagtcagtgcaggccagctccacatcctgaaggggatgccatccgggtacgaacagctcagaggctgaatggccctatcacccgggaggagcctggagggtattccatctaatcctgtggctaagcggggtggatgagggaacacacggacttgttcgagaatttgcccagcagcacgaaactacttagaagcagaaaactggggcaggacctggcgtgggagttagggagccctccact

SEQ ID NO: 1150 - DNA, 536 bp, Homo sapiens
  misc_feature 338: n = A,T,C or G
ctttttttttttttttgagatggagtctcgctctgtcacccaggctagagtgcagtggcatgaccttggcttactgcaacctccgcctcctgggttcaagcgattccagaagagagaattcttagagtcagagggaggagtagaaggaaaaagatatttaaaaagctatgcttcaagaggacatttcatgctgtcaaaatgagactgtgaatcagaaagttctcggggaactgcaaggtgctctcaactaggggtcggttccttctcagtcatggcactgactcatctccacagggttctcacctgcgggaggaaaatggaggagttgcgcctgtcanaaactgtctgtgtgattcggggaagaatatggagtatcttagtagcattccattattacttgcccctaaatacatgatgccagccccctgcacagataacctcctgcttttatagcttgaaatatatttgatctaaaccacgatttgacatcttcagagagagagaagtagataaaagtctccattccaggttggcag

SEQ ID NO: 1151 - DNA, 599 bp, Homo sapiens
  misc_feature 495: n = A,T,C or G
tatagggcgaattgggccctctagatgcatgctcgagagagctacctttttccttttatgtataaggacacagctacaaaatgccatgtatgatccagaggcctaatttgttgatcccttaatcttggacttcccaccattgagaacagcgagaaataaatttctgttgtttataagctgccaagttcatagtatttcattacagcagcctgcacagaccaaggcagtatttttttttaatgtcttctaagggaacccccccaaaagtaaacaaaaatctacaaaagttatttgtatgatcaaaatcaaaacattcttattcacgaaatagaagctacagtaaattttcaaaaaataagagttaaaaaactccccccatatgatatattttacagtttcacaagggtaccaggtcgtgaaggaattttattaaatctattaaatcatagatagcttttaataagttcaattttactttaagagctaataagttanttgatattaacctttttacttataaggtaagtgggagatatgacatcataatcttagacatttaaaaaatcctgagaaagattatttcaatcttttacagtttg

SEQ ID NO: 1152 - DNA, 607 bp, Homo sapiens
  misc_feature 26: n = A,T,C or G
actatagggcgaattgggccctctanatgcatgctcgagcaccgtcattaccccgagcacctgcagccccaggaagtcctggccgtcctcgctcaccaggagcccctcttggacccatgggtccaggagctccattttcgcctggaagaccattttcaccctttaatccaggagcacctgtttcacccttttctccatttcgtccatcgaagcctctgtgtcctttcataccagggaatccaggtatcccagctggacctttgatacctggaggtccaggcaatcctcgctctccaggtcgtccgggtctacctgattctccatcttttccagcaggaccagatggacctatagcaccaggaggtcctggagggcctgaaggaccagcttgcccaggttcaccagggggtccttggtatcctggagatccaggggaaccaggatgaccagatgtaccagggggaccgggagggcctggggggccagctggtccaggatagcctgcgagtcctcctactgctactccagacttgacatcatatgaatcatactggggagaatagttctgaggaccagtagggcatgattcacagattccaggggggcc

SEQ ID NO: 1153 - DNA, 645 bp, Homo sapiens
cgactcatatagggcgaattgggccctctagatgcatgctcgagcggccgccctttttttttttttttttactttgacaacaaattatattttaaatgtttcatatttacttttatatttccatacaatcagaaacagtaaaaaaaatttggagagcacataaaaacatcttaaagttaaaaatataaagccttgtatttaaaaatgcagtcatttaaataatattataagaatctatttgtacataataaacaagtttcaaccagcaagaaattactaatattgactgtggagttttggctgttttaatagttctaactcattattccgtaattcaacacagcactaccaacacagctggcaatgacaagactgggagtatcaaactaggattgttagttcaattaaaatttcagataaacaataatgtacttatactaaaaaattatttgttgtatatctgaaatgaaaatttaactgggtacccaattgtttgtttgtttaatctaaaaaccctgattgaaatttatctaataaaacatcatttaatatctaaaataaaataaatttactataacatctttataactattcaatcaatgattcatcttctatttttccaaattcttgcacaaatatttgatg

SEQ ID NO: 1154 - DNA, 596 bp, Homo sapiens
gtatacgactcactatagggcgaattgggccctctagatgcatgctcgagaagtaattatcagttggtttggatttttggaccaccgttcagtcattttgggttgccgtgctcccaaaacattttaaatgaaagtattggcattcaaaaagacagcagacaaaatgaaagaaaatgagagcagaaagtaagcatttccagcctatctaatttctttagttttctatttgcctccagtgcagtccatttcctaatgtataccagcctactgtactatttaaaatgctcaatttcagcaccgatggccatgtaaataagatgatttaatgttgattttaatcctgtatataaaataaaaagtcacaatgagtttgggcatatttaatgatgattatggagccttagaggtctttaatcattggttcggctgcttttatgtagtttaggctggaaatggtttcacttgctctttgactgtcagcaagactgaagatggcttttcctggacagctagaaaacacaaaatcttgtaggtcattgcacctatctcagccataggtgcagtttgcttctacatgatgctaaaggctgcgaatg

SEQ ID NO: 1155 - DNA, 355 bp, Homo sapiens
  misc_feature 240, 309: n = A,T,C or G
atagggcgaattgggccctctagatgcatgctcgagcggccgccctttttttttttttttttttaaatttaaaaagatgtcctcactgcacaagtgactacgggctacaggcaaggatgggagacggaggcttcaacacaactcattgcacttagaaccgttactaaccgaaacaccatttgcttgtcaacaatgtacccttgacagcagggagaaacttctttatagtctctgcttcanacaagatttacagctttctccaaggccagaggccaattgtgaccacaagtcttgtttcttgtccaccanacccaatcctctggcaccttgtaccccccgttccgtcgacgcggcc

SEQ ID NO: 1156 - DNA, 674 bp, Homo sapiens
  misc_feature 620: n = A,T,C or G
gccaactcacacaaggcaggtgagtgaggaaatccagagttgccatggagaaaaatccagtgtcagcattcttgctccttgtggccctctcctacactctggccagagataccacagtcaaacctggagccaaaaaggacacaaaggactctcgacccaaactgccccagaccctctccagaggttggggtgaccaactcatctggactcagacatatgaagaagctctatataaatccaagacaagcaacaaacccttgatgattattcatcacttggatgagtgcccacacagtcaagctttaaagaaagtgtttgctgaaaataaagaaatccagaaattggcagagcagtttgtcctcctcaatctggtttatgaaacaactgacaaacacctttctcctgatggccagtatgtccccaggattatgtttgttgacccatctctgacagttagagccgatatcactggaagatattcaaaccgtctctatgcttacgaacctgcagatacagctctgttgcttgacaacatgaagaaagctctcaagttgctgaagactgaattgtaaagaaaaaaaatctccaagcccttctgtctgtcaggccttgagacttgnaaccagaagaagtgtgagaagactggctagtgtggaagcatagtgaacacactg

SEQ ID NO: 1157 - DNA, 556 bp, Homo sapiens; identical to SEQ ID NO: 896

SEQ ID NO: 1158 - DNA, 531 bp, Homo sapiens
gctagcgacgcggggccgggcggctgagcgttcgcggggccgaggccatggctttttgggcggggggttcgcccagcgtcgtggactatttccctagcgaggacttctaccgctgcggctactgcaagaacgagtcgggcagccgctccaatggcatgtgggcacattccatgacagtacaggattatcaggatctcatagaccgaggatggcgaagaagtggaaaatatgtgtacaaacctgtcatgaatcaaacatgttgtcctcagtacacaataaggtgccgacctttacaatttcagccttcaaaatctcacaagaaggttttgaaaaaaatgttgaaatttctagctaaaggggaggttcccaaaggaagttgtgaggatgagcccatggattccacaatggatgatgctgttgcgggtgactttgcattgataaataaactggatatacagtgtgatcttaaaacactcagtgatgacatcaaagagagtttagagagtgaaggaaaaaattcaaagaaagaag

SEQ ID NO: 1159 - DNA, 257 bp, Homo sapiens
  misc_feature 33, 34: n = A,T,C or G
tacgactcactatagggcgaattgggccctctnnatgcatgctcgagataaaaccatcaagctatggaataccctgggtgtgtgcaaatacactgtccaggatgagagccactcagagtgggtgtcttgtgtccgcttctcgcccaacagcagcaaccctatcatcgtctcctgtggctgggacaagctggtcaaggtatggaacctggctaactgcaagctgaagaccaaccacattggccacacaggctatctga

SEQ ID NO: 1160 - DNA, 672 bp, Homo sapiens
  misc_feature 565, 620: n = A,T,C or G
gccaactcacacaaggcaggtgagtgaggaaatccagagttgccatggagaaaaatccagtgtcagcattcttgctccttgtggccctctcctacactctggccagagataccacagtcaaacctggagccaaaaaggacacaaaggactctcgacccaaactgccccagaccctctccagaggttggggtgaccaactcatctggactcagacatatgaagaagctctatataaatccaagacaagcaacaaacccttgatgattattcatcacttggatgagtgcccacacagtcaagctttaaagaaagtgtttgctgaaaataaagaaatccagaaattggcagagcagtttgtcctcctcaatctggtttatgaaacaactgacaaacacctttctcctgatggccagtatgtccccaggattatgtttgttgacccatctctgacagttagagccgatatcactggaagatattcaaaccgtctctatgcttacgaacctgcagatacagctctgttgcttgacaacatgaagaaagctctcaagttgctgaagactgnattgtaaagaaaaaaaatctccaagcccttctgtctgtcaggccttgagacttgnaaccagaagaagtgtgagaagactggctagtgtggaagcatagtgaacacac

SEQ ID NO: 1161 - DNA, 556 bp, Homo sapiens; identical to SEQ ID NO: 896

SEQ ID NO: 1162 - DNA, 611 bp, Homo sapiens
  misc_feature 88: n = A,T,C or G
tatacgactcactatagggcgaattgggccctctagatgcatgctcgagagagctacctttttccttttatgtataaggacacagctngaaaatgccatgtatgatccagaggcctaatttgttgatcccttaatcttggacttcccaccattgagaacagcgagaaataaatttctgttgtttataagctgccaagttcatagtatttcattacagcagcctgcacagaccaaggcagtatttttttttaatgtcttctaagggaacccccccaaaagtaaacaaaaatctacaaaagttatttgtatgatcaaaatcaaaacattcttattcacgaaatagaagctacagtaaattttcaaaaaataagagttaaaaaactccccccatatgatatattttacagtttcacaagggtaccaggtcgtgaaggaattttattaaatctattaaatcatagatagcttttaataagttcaattttactttaagagctaataagttacttgatattaacctttttacttataaggtaagtgggagatatgacatcataatcttagacatttaaaaaatcctgagaaagattatttcaatcttttacagtttg

SEQ ID NO: 1163 - DNA, 637 bp, Homo sapiens
  misc_feature 626: n = A,T,C or G
gccaactcacacaaggcaggtgagtgaggaaatccagagttgccatggagaaaaatccagtgtcagcattcttgctccttgtggccctctcctacactctggccagagataccacagtcaaacctggagccaaaaaggacacaaaggactctcgacccaaactgccccagaccctctccagaggttggggtgaccaactcatctggactcagacatatgaagaagctctatataaatccaagacaagcaacaaacccttgatgattattcatcacttggatgagtgcccacacagtcaagctttaaagaaagtgtttgctgaaaataaagaaatccagaaattggcagagcagtttgtcctcctcaatctggtttatgaaacaactgacaaacacctttctcctgatggccagtatgtccccaggattatgtttgttgacccatctctgacagttagagccgatatcactggaagatattcaaaccgtctctatgcttacgaacctgcagatacagctctgttgcttgacaacatgaagaaagctctcaagttgctgaagactgaattgtaaagaaaaaaatctccaagcccttctgtctgtcaggccttgagacttgaaaccagnagaagtgtgag

SEQ ID NO: 1164 - DNA, 259 bp, Homo sapiens
  misc_feature 12: n = A,T,C or G
atacgactcacntatagggcgaattgggccctctacatgcatgctcgagataaaaccatcaagctatggaataccctgggtgtgtgcaaatacactgtccaggatgagagccactcagagtgggtgtcttgtgtccgcttctcgcccaacagcagcaaccctatcatcgtctcctgtggctgggacaagctggtcaaggtatggaacctggctaactgcaagctgaagaccaaccacattggccacacaggctatctga

SEQ ID NO: 1165 - DNA, 196 bp, Homo sapiens
gcatgctcgagcggccgcgacgcccgccgcagctggggcgatccacggggcagggcccggctcgcgtccagagtcgccgccgccgccggccccccgggtgcccgggcccccctcgcgggggaccgtgcccccgccgccggggccccgcggcgggccgccgccggcccctgccgccccgacccttctccccccgccg

SEQ ID NO: 1166 - DNA, 521 bp, Homo sapiens
  misc_feature 501: n = A,T,C or G
ctatagggcgaattgggccctctacatgcatgctcgagttgctgcagtggcttgggcgtcaggaggctcactgagggggccacatgaccccagccagtgacagtgcagtggaggccgttggggaaggaggcgttggctgcagggaggcagatgggccggatgtagcgggagaaggtgatgggtctgctgagttggaggagtgcaatgtcgccctgggagccctcctggaggtagctggggtgggggatgatgtccttcagggtgctgaccttggcgtcctcggagtaggagtctagctggtgggcccccagcttgacctcataggcttccttgtggtgctcgctggggaagcagtgagcagctgacagcacccactgctcagacacgagagagccaccacacacatggacgccttcataggtgatgctgacctgccagggccactgaccggcgactgcactgctgccacctgtgatgcgtgcttggggggccacaccgcanggagcttctgccccttccgc

SEQ ID NO: 1167 - DNA, 683 bp, Homo sapiens
  misc_feature 581, 606, 633, 670: n = A,T,C or G
gccctctagatgcatgctcgagcggccgccctttttttttttttttttagttatagagctaattggcttttatttgtgatttatgaattaaagcagcaccactctacaagtacagtgatagctccccctgggcaatacaatacaagaacagtgggttttgtcaaattggaacaaggaaacagaaccacagaaataaatacattggttaacatcagattagttcaggttacttttttgtaaaagttaaagtagaggggacttctgtattatgctaactcaagtagactggaatctcctgtgttctttttttttttaaattggttttaattttttttaattggatctatcttcttccttaacatttcagttggagtatgtagcatttagcaccactggctcaatgcgctcacctaggtgagagtgtgaccaaatcttaaagcattagtgctattatcagttaccaccatttggggcttttatccttcatgggttatgatgttctcctgatgacacatttctctgagttttgtaattccagccaaagagagaccattcactatttgatggctggctgcatgcanacatttaaagcttttagagaatacnctacaccagggagtatgactactagtntgactattaggagggtaataccaagagttggactacncaccttaggcaag

SEQ ID NO: 1168 - DNA, 252 bp, Homo sapiens
ctcactatagggcgaattgggccctctagatgcatgctcgagataaaaccatcaagctatggaataccctgggtgtgtgcaaatacactgtccaggatgagagccactcagagtgggtgtcttgtgtccgcttctcgcccaacagcagcaaccctatcatcgtctcctgtggctgggacaagctggtcaaggtatggaacctggctaactgcaagctgaagaccaaccacattggccacacaggctatctga

SEQ ID NO: 1169 - DNA, 318 bp, Homo sapiens
gccaactcacacaaggcaggtgagtgaggaaatccagagttgccatggagaaaaatccagtgtcagcattcttgctccttgtggccctctcctacactctggccagagataccacagtcaaacctggagccaaaaaggacacaaaggactctcgacccaaactgccccagaccctctccagaggttggggtgaccaactcatctggactcagacatatgaagaagctctatataaatccaagacaagcaacaaacccttgatgattattcatcacttggatgagtgcccacacagtcaagctttaaagaaagtgtttg

SEQ ID NO: 1170 - DNA, 488 bp, Homo sapiens
atagggcgaattgggccctctagatgcatgctcgaggagccacttttttgttttttaatcagctgctgcatttcctctctcccgtatctttgggctctcaggactaactaggtttgccagcttctctcttatcactgcttttaacctgcctaggaggtgtggaaagagacacagtaagtaaagtaaccagagcttggctcattctcctataaaaaaggccgaagttgaaatactgtccccttaagcttcagaggtgcaagatgggaataattattgcacactactacatcttataaatttatgagataatggaacataaaggacctggcaaagcagtaaatgtcagctaatattatttctgctgctactatagatttaacaccattcaaggtgctatggagatgtgaggccatttaatataagccagcagtccaaaaaggtgacaaaggctcctattccacatgtggaacttaggccacattaactcc

SEQ ID NO: 1171 - DNA, 115 bp, Homo sapiens
gagcggccgcgacgcccgccgcatctggggcgatccacgggaagggcccggctcgcgtccagagtcgccgccgccgccggccccccgggtgcccgggcccccctcgcgggggacc

SEQ ID NO: 1172 - DNA, 652 bp, Homo sapiens
  misc_feature 35, 498: n = A,T,C or G
tatacgactcatatagggcgaattgggccctctanatgcatgctcgaggtggtggcagggccgccccctgcagtccggagacgaacgcacggaccgggcctccggaggcaggttcggctggaaggaaccgctctcgcttcgtcctacacttgcgcaaatgtctccgagcttactcacatagcatattggtatatcaaaatgaaatgcaaggaaccaaaaataacataattgaaggcagtaaaagtgaaattaaataggaagatcatcagtcaaggaagacccactggagaggacagaaaatgaagcagtgttttatcatgtgtatttcagcaggtcttcttgaaatttaactaaaaatatgactgctctctcttcagagaactgctcttttcagtaccagttacgtcaaacaaaccagcccctagatgttaactatctgctattcttgatcatacttgggaaaatattattaaatatccttacactaggaatgagaanaaaaaacacctgtcaaaattttatggaatatttttgcatttcactagcattcgttgatcttttacttttggtaaacatttccattatattgtatttcagggattttgtacttttaagcattaggttcactaaataccacatctgcctatttact

SEQ ID NO: 1173 - DNA, 602 bp, Homo sapiens
  misc_feature 79, 495, 496, 507, 581, 582, 584: n = A,T,C or G
actatagggcgaattgggccctctagatgcatgctcgagcggccgcccttttttttttttttttacactcagattgttnatttaaaaatgcccaaaacacaaaaatagacttttaaggtaataatatatattactaaatatattatagtctacttataataattatatcgtcgttttcaatattacaaaaaaaggaagaaaaatacaagggaagcagacgacccaatatatataaatactataaaatcatattagaataaataaagtcgtcataaataaagggcccattgatttatgggtggggtttggcaacggctttggctacttgcttttggagggtaatttgagcaccaggattccccctcaggagaggttccagttaccaggagacactggaacctcaggtctataaaaactggaggggcagtgaaggcctattattcacagcacataagattctaggagacagatttgggcagggaagaggtgggggannagggttcattncctcccttaaatatgctacaattttttttcccccaagaaccttggaagacactccatcccccaccatcatgaanncngagcttgcacacttgggg

SEQ ID NO: 1174 - DNA, 572 bp, Homo sapiens
atgcatgctcgagcaccgtcattaccccgagcacctgcagccccaggaagtcctggccgtcctcgctcaccaggagcccctcttggacccatgggtccaggagctccattttcgcctggaagaccattttcaccctttaatccaggagcacctgtttcacccttttctccatttcgtccatcgaagcctctgtgtcctttcataccagggaatccaggtatcccagctggacctttgatacctggaggtccaggcaatcctcgctctccaggtcgtccgggtctacctgattctccatcttttccagcaggaccagatggacctatagcaccaggaggtcctggagggcctgaaggaccagcttgcccaggttcaccagggggtccttggtatcctggagatccaggggaaccaggatgaccagatgtaccagggggaccgggagggcctggggggccagctggtccaggatagcctgcgagtcctcctactgctactccagacttgacatcatatgaatcatactggggagaatagttctgaggaccagtagggcatgattcacagattcc

SEQ ID NO: 1175 - DNA, 591 bp, Homo sapiens; identical to SEQ ID NO: 439

SEQ ID NO: 1176 - DNA, 393 bp, Homo sapiens
  misc_feature 8: n = A,T,C or G
cgactcantatagggcgaattgggccctctagatgcatgctcgagggtgtaaagcaggccctctggctcaccaagaccaagttaatagaaggccttcccgagaaagtgcttagccttgttgatgatccaaggaaccacatagagaaccaagacgagtgcgttctgaatgtgatctctcacgcccgtctctggcagaccactgaggaaatccccaagagagagacctactgcccggtcatcgtggacaacctaatacagctgtgtaaatctcagattctcaagcatccttctctggccaggaggatctgtgtccaaaactccacgttttctgctacctggaaccgagagtctcttctccttcaagtccgtggttctggtggagcccgactgagc

SEQ ID NO: 1177 - DNA, 535 bp, Homo sapiens; identical to SEQ ID NO: 887

SEQ ID NO: 1178 - DNA, 596 bp, Homo sapiens
  misc_feature 89: n = A,T,C or G
gtatacgactcactatagggcgaattgggccctctagatgcatgctcgagaagtaattatcagttggtttggatttttggaccaccgtncagtcattttgggttgccgtgctcccaaaacattttaaatgaaagtattggcattcaaaaagacagcagacaaaatgaaagaaaatgagagcagaaagtaagcatttccagcctatctaatttctttagttttctatttgcctccagtgcagtccatttcctaatgtataccagcctactgtactatttaaaatgctcaatttcagcaccgatggccatgtaaataagatgatttaatgttgattttaatcctgtatataaaataaaaagtcacaatgagtttgggcatatttaatgatgattatggagccttagaggtctttaatcattggttcggctgcttttatgtagtttaggctggaaatggtttcacttgctctttgactgtcagcaagactgaagatggcttttcctggacagctagaaaacacaaaatcttgtaggtcattgcacctatctcagccataggtgcagtttgcttctacatgatgctaaaggctgcgaatg

SEQ ID NO: 1179 - DNA, 665 bp, Homo sapiens
  misc_feature 6: n = A,T,C or G
cgactnatatagggcgaattgggccctctagatgcatgctcgagcggccgccctttttttttttttttttttactttgacaacaaattatattttaaatgtttcatatttacttttatatttccatacaatcagaaacagtaaaaaaaatttggagagcacataaaaacatcttaaagttaaaaatataaagccttgtatttaaaaatgcagtcatttaaataatattataagaatctatttgtacataataaacaagtttcaaccagcaagaaattactaatattgactgtggagttttggctgttttaatagttctaactcattattccgtaattcaacacagcactaccaacacagctggcaatgacaagactgggagtatcaaactaggattgttagttcaattaaaatttcagataaacaataatgtacttatactaaaaaattatttgttgtttatctgaaatgaaaatttaactgggtacccaattgtttgtttgtttaatctaaaaaccctgattgaaatttatctaataaaacatcatttaatatctaaaataaaataaatttactataacatctttataactattcaatcaatgattcatcttctatttttccaaattcttgcacaaatatttgatgcttaaataaatacataaa

SEQ ID NO: 1180 - DNA, 249 bp, Homo sapiens
actatagggcgaattgggccctctagatgcatgctcgagataaaaccatcaagctatggaataccctgggtgtgtgcaaatacactgtccaggatgagagccactcagagtgggtgtcttgtgtccgcttctcgcccaacagcagcaaccctatcatcgtctcctgtggctgggacaagctggtcaaggtatggaacctggctaactgcaagctgaagaccaaccacattggccacacaggctatctga

SEQ ID NO: 1181 - DNA, 481 bp, Homo sapiens
  misc_feature 24, 151, 174, 344, 347, 398, 414, 422, 429: n = A,T,C or G
tatagggcgaattgggccctctantatgcatgctcgagcggccgccctttttttttttttttttttttttcttttttgaaaaagtcatggaggccatggggttggcttgaaaccagctttggggggttcgattccttccttttttgtctanattttatgtatacgggttcttcnaatgtgtggtagggtggggggcatccatatagtcactccaggtttatggagggttcttctactattaggacttttcgcttcgaagcgaaggcttctcaaatcatgaaaattattaatattactgctgttagagaaatgaatgagcctacagatgataggatgtttcatgnggngtatgcatcggggtagtccgagtaacgtcggggcattccggataggccganaaagtgttgtgggaanaaagttanatttacnccgatgaatatgatagtgaaatggattttggcgtaggtttggtctagggtgt

SEQ ID NO: 1182 - DNA, 623 bp, Homo sapiens; identical to SEQ ID NO: 1133

SEQ ID NO: 1183 - DNA, 458 bp, Homo sapiens
  misc_feature 129, 430, 455: n = A,T,C or G
tagggcgaattgggccctctagatgcatgctcgagcggccgcccttttttttttttttttcaagtgaagaaaaacatcctttattttttgatgagcaaaaataataaattgctgttcacactggataanaccatatcaaaagtgacagtaaacatgtacactgttggtgttatatggggatggggttctcggtaattttgtttattatttatgtttattattatgttttatcattaattattcaataaatttttatttaaaaagtcaccctacttaaaaatcttctgtgggggtgggagggacaaaagattacaaaccaaaactcaggagatggtaacactggaattgataaaatcacctgggattagttgtataactctgaaccaccaaacctctgctatcaagccttgctacagtcatggctgtccanaaagatttacagttatttttctganaaa

SEQ ID NO: 1184 - DNA, 706 bp, Homo sapiens
  misc_feature 2, 645, 659: n = A,T,C or G
cnactcactatagggcgaattgggccctctagatgcatgctcgagtgggagagcatgtggaacgtggagaattgattggaaaaacgggaaataccggaagaacaacggggccacacttacattttgaaatacgacgctccggaaaaacactcaatccgatgaagtacttataaattttgaaatatggttaagaaagaatggtgttaaaaacatgggaaaagagagtcgagaaatacaaatcgggatgttaagattgggaaaaggaaatcccgttgtgattcaatcgatgattaacacggaaactgcggatgtagaagcgagtgtcaggcaaattttggatttggaagaagccggctgtgaattggttcgtatgacgatcaatacaaaagaggcggctatggcaattcccgcgattaaaaagagagttcatattcctttggtagcggatattcattttgattatcgacttgccttattggcgatagaacagggaattgacaaattacggattaatcccggaaatatcggttctgaagaaaatattcgtttggttgcggaagcggcaaaaaggaagagaattccgattcgtattggagtcaatgcaggttctttggaaaaacatatcttggaaaaatatggagcggnaacggcagatgctntggtcaaaagcgctatgtatcatgtaaaactgttggaacaatttgcc

SEQ ID NO: 1185 - DNA, 647 bp, Homo sapiens
  misc_feature 76: n = A,T,C or G
atagggcgaattgggccctctagatgcatgctcgagcggccgccctttttttttttttttttttaaaaatataaanccttgtatttaaaaatgcagtcatttaaataatattataagaatctatttgtacataataaacaagtttcaaccagcaagaaattactaatattgactgtggagttttggctgttttaatagttctaactcattattccgtaattcaacacagcactaccaacacagctggcaatgacaagactgggagtatcaaactaggattgttagttcaattaaaatttcagataaacaataatgtacttatactaaaaaattatttgttgtttatctgaaatgaaaatttaactgggtacccaattgtttgtttgtttaatctaaaaaccctgattgaaatttatctaataaaacatcatttaatatctaaaataaaataaatttactataacatctttataactattcaatcaatgattcatcttctatttttccaaattcttgcacaaatatttgatgcttaaataaatacataaataataaataggttaataagttacacttgaaaataatttatgttatgatgaaaaaacttaaagtgcttccacatgtcctcacaacatcactgtgaggta

SEQ ID NO: 1186 - DNA, 425 bp, Homo sapiens
  misc_feature 32, 352: n = A,T,C or G
ctttttttttttttttaacaaataaaattctntatttaaatttctcttgtggggaaaatatttttctttaaagcacacttaaaagtaatttgcatttacttcctgtaaagcatttccatttcacaattagcaaaactaaaaggctatgtctcttcatgcatttatttttgttagaaaaatgtcccatggtgctatcaaaccgattttaaccatcatcaagcttaactttgcctctgttgacaacatgactacaaacatgaatcaaaaaggagttaaggaattttaagccataaggtttcaattatagcttaccaattatgtaattagctgacaaaaatcaagtctgatgtanaatagctgtcatctacttaactgcagataatcatggcattttcatttaagatgatctgaacttatgaaataaa

SEQ ID NO: 1187 - DNA, 597 bp, Homo sapiens
  misc_feature 447, 539, 570, 571: n = A,T,C or G
gccaactcacacaaggcaggtgagtgaggaaatccagagttgccatggagaaaaatccagtgtcagcattcttgctccttgtggccctctcctacactctggccagagataccacagtcaaacctggagccaaaaaggacacaaaggactctcgacccaaactgccccagaccctctccagaggttggggtgaccaactcatctggactcagacatatgaagaagctctatataaatccaagacaagcaacaaacccttgatgattattcatcacttggatgagtgcccacacagtcaagctttaaagaaagtgtttgctgaaaataaagaaatccagaaattggcagagcagtttgtcctcctcaatctggtttatgaaacaactgacaaacacctttctcctgatggccagtatgtccccaggattatgtttgttgacccatctntgacagttagagccgatatcactggaagatattcaaaccgtctctatgcttacgaacctgcagatacagctctgttgcttgacaacatgaanaaagctctcaagttgctgaagactgaattgnnaagaaaaaaaatctgcaagcccttct

SEQ ID NO: 1188 - DNA, 190 bp, Homo sapiens
attgggccctctagatgcatgctcgagcgatggcctatgtccccgcaccgggctaccagcccacctacaacccgacgctgccttactaccagcccatcccgggcgggctcaacgtgggaatgtctgtttacatccaaggagtggccagcgagcacatgaagcggttcttcgtgaactttgtggttgggca

SEQ ID NO: 1189 - DNA, 290 bp, Homo sapiens
ctttttttttttttttatttttatagcttttgtaatttattataacattatttcaaaatgaaaggttaaaaaacatacattaaagtataagtgttcttaccaaattaaaaaaattgtcttcccttttataaaatgatcaccatgggtttattttaagaatcaattcatgactggctgtactaaaaatatgatttgatctattactttgtgaatatatacaataatgtgattcagcccaatactttgttcattcattcagcaattacttattaagggcacactgcatgcaa

SEQ ID NO: 1190 - DNA, 666 bp, Homo sapiens
  misc_feature 74, 591: n = A,T,C or G
tagggcgattgggccctctagatgcatgctcgagcggccgccctttttttttttttttttttatagagctaatnggcttttatttgtgatttatgaattaaagcagcaccactctacaagtacagtgatagctccccctgggcaatacaatacaagaacagtgggttttgtcaaattggaacaaggaaacagaaccacagaaataaatacattggttaacatcagattagttcaggttacttttttgtaaaagttaaagtagaggggacttctgtattatgctaactcaagtagactggaatctcctgtgttctttttttttttaaattggttttaattttttttaattggatctatcttcttccttaacatttcagttggagtatgtagcatttagcaccactggctcaatgcgctcacctaggtgagagtgtgaccaaatcttaaagcattagtgctattatcagttaccaccatttggggcttttatccttcatgggttatgatgttctcctgatgacacatttctctgagttttgtaattccagccaaagagagaccattcactatttgatggctggctgcatgcanacatttaaagcttttagagaatacactacaccagggagtatgactactagtatgactattaggagggtaatacca

SEQ ID NO: 1191 - DNA, 594 bp, Homo sapiens
  misc_feature 504, 505: n = A,T,C or G
acgactaatatagggcgaattgggccctctagatgcatgctcgagcggccgccctttttttttttttttttggtggtggttgctattttatttaaaacttttaaagaagttgtttattgccaataattaaagagctcaaagggaagtcatttaaccatgagattgccaaatagaactctacaacagctgattcaacctttttaaaattttccctggggagagacttcactactatctctgctgatggactccatagttctcatactttacctgaaagttcttcctaacatctgatctcaacctttcttgccggggcattggcctgttttcccagccaagccttgtttttgtttttgaggaacgaacagcttttttgggtacagaccaggagtccatgggtcttgaggacctctgtgtatttatcagttttcttctccacattctttttggcctgtctccatagacttgtgagccccatgccttgtttaagggggaaaaatggcnnttccctacaaattaaatgtaagaatccatagagaactggaccccattaaaaatatttggaattcacatggccacttgatcatattccgc

SEQ ID NO: 1192 - DNA, 62 bp, Homo sapiens
  misc_feature 47, 48, 50: n = A,T,C or G
ctttttttttttttttttttttttttttttttttttttttttttttnnangggaaaaaaaaa

SEQ ID NO: 1193 - DNA, 260 bp, Homo sapiens
  misc_feature 11: n = A,T,C or G
taatacgactnactatagggcgaattgggccctctacatgcatgctcgagataaaaccatcaagctatggaataccctgggtgtgtgcaaatacactgtccaggatgagagccactcagagtgggtgtcttgtgtccgcttctcgcccaacagcagcaaccctatcatcgtctcctgtggctgggacaagctggtcaaggtatggaacctggctaactgcaagctgaagaccaaccacattggccacacaggctatctga

SEQ ID NO: 1194 - DNA, 521 bp, Homo sapiens
  misc_feature 58, 94, 154, 177, 191, 198, 271, 289, 320, 441, 451, 456,463, 504, 506: n = A,T,C or G
gccctctagatgcatgctcgagcggccgccctttttttttttttttttttttttttgntttttttttttttttttttggctctaaagggggtanagggggtgctatagggtaaataccgggccccatttcaaagatttttaggggaattaattntaggacgatgggcatgaaactgnggtttgctccacanatttcanagcattgaccgtagtatacccccggtcgtgtagcggtgaaagtggtttggtttaaacgtccgggaattgcatntgtttttaagcctaatgnggggacagctcatgagtgcaagacgtcttgngatgtaattattatacgaatgggggcttcaatcgggagtactactcgattgtcaacgtcaaggagtcgcaggtcgcctggttctaggaataatgggggaagtatgtaggagttgaaattantccgccgtantcggngtactcntaggttcagtaccattggtggccaattgatttgatggtaananagggatcgttgacct

SEQ ID NO: 1195 - DNA, 539 bp, Homo sapiens; identical to SEQ ID NO: 957

SEQ ID NO: 1196 - DNA, 660 bp, Homo sapiens
  misc_feature 2, 84: n = A,T,C or G
cnactcatatagggcgaattgggccctctagatgcatgctcgagcggccgccctttttttttttttttttagttatagagctanttggcttttatttgtgatttatgaattaaagcagcaccactctacaagtacagtgatagctccccctgggcaatacaatacaagaacagtgggttttgtcaaattggaacaaggaaacagaaccacagaaataaatacattggttaacatcagattagttcaggttacttttttgtaaaagttaaagtagaggggacttctgtattatgctaactcaagtagactggaatctcctgtgttctttttttttttaaattggttttaattttttttaattggatctatcttcttccttaacatttcagttggagtatgtagcatttagcaccactggctcaatgcgctcacctaggtgagagtgtgaccaaatcttaaagcattagtgctattatcagttaccaccatttggggcttttatccttcatgggttatgatgttctcctgatgacacatttctctgagttttgtaattccagccaaagagagaccattcactatttgatggctggctgcatgcaaacatttaaagcttttagagaatacactacaccagggagtatgactactagtatgact

SEQ ID NO: 1197 - DNA, 637 bp, Homo sapiens
gccaactcacacaaggcaggtgagtgaggaaatccagagttgccatggagaaaaatccagtgtcagcattcttgctccttgtggccctctcctacactctggccagagataccacagtcaaacctggagccaaaaaggacacaaaggactctcgacccaaactgccccagaccctctccagaggttggggtgaccaactcatctggactcagacatatgaagaagctctatataaatccaagacaagcaacaaacccttgatgattattcatcacttggatgagtgcccacacagtcaagctttaaagaaagtgtttgctgaaaataaagaaatccagaaattggcagagcagtttgtcctcctcaatctggtttatgaaacaactgacaaacacctttctcctgatggccagtatgtccccaggattatgtttgttgacccatctctgacagttagagccgatatcactggaagatattcaaaccgtctctatgcttacgaacctgcagatacagctctgttgcttgacaacatgaagaaagctctcaagttgctgaagactgaattgtaaagaaaaaaatctccaagcccttctgtctgtcaggccttgagacttgaaaccagaagaagtgtgag

SEQ ID NO: 1198 - DNA, 554 bp, Homo sapiens
gccaactcacacaaggcaggtgagtgaggaaatccagagttgccatggagaaaaatccagtgtcagcattcttgctccttgtggccctctcctacactctggccagagataccacagtcaaacctggagccaaaaaggacacaaaggactctcgacccaaactgccccagaccctctccagaggttggggtgaccaactcatctggactcagacatatgaagaagctctatataaatccaagacaagcaacaaacccttgatgattattcatcacttggatgagtgcccacacagtcaagctttaaagaaagtgtttgctgaaaataaagaaatccagaaattggcagagcagtttgtcctcctcaatctggtttatgaaacaactgacaaacacctttctcctgatggccagtatgtccccaggattatgtttgttgacccatctctgacagttagagccgatatcactggaagatattcaaaccgtctctatgcttacgaacctgcagatacagctctgttgcttgacaacatgaagaaagctctcaagttg

SEQ ID NO: 1199 - DNA, 572 bp, Homo sapiens
gccaactcacacaaggcaggtgagtgaggaaatccagagttgccatggagaaaaatccagtgtcagcattcttgctccttgtggccctctcctacactctggccagagataccacagtcaaacctggagccaaaaaggacacaaaggactctcgacccaaactgccccagaccctctccagaggttggggtgaccaactcatctggactcagacatatgaagaagctctatataaatccaagacaagcaacaaacccttgatgattattcatcacttggatgagtgcccacacagtcaagctttaaagaaagtgtttgctgaaaataaagaaatccagaaattggcagagcagtttgtcctcctcaatctggtttatgaaacaactgacaaacacctttctcctgatggccagtatgtccccaggattatgtttgttgacccatctctgacagttagagccgatatcactggaagatattcaaaccgtctctatgcttacgaacctgcagatacagctctgttgcttgacaacatgaagaaagctctcaagttgctgaagactgaattgtaa

SEQ ID NO: 1200 - DNA, 645 bp, Homo sapiens
  misc_feature 80, 102, 165, 176, 246, 260, 271, 276, 279, 292, 293, 301,329, 332, 349, 363, 366, 382, 392, 403, 409, 432, 457, 512,545, 550, 554, 601, 611, 628: n = A,T,C or G
atagggcgaattgggccctctagatgcatgctcgagcggccgccctttttttttttttttttttttttttcatcattcanaagtttttaataaacaacttcnttataaaaacctttttttgaaaatgtaattctgtaaaacattgaaaaatctactttaacaaanatatgccctgngcattttctaatggcacttatactttacaattaaaaaccttgttttatataaagccaaaaatactccaanaggttattcactgngtttacaaagngctanaanatttctgtcttgnncttttctntttaaataatctggagttacaaaagagnggntccaaagccttgaccgntggtagggaggganaancatgaaaagtggtgtntcaggagttntagtgccaaanatgganaggtgcaagtgggaacaatcagntaaggaagtcagctgacacacaaanaaatcggactggaatttttccaaacccctctatggaggcactaggttatcatggngaacacccttttccctcgccataaaccctactntccanaggngaaggtcatggccaattccttccacagcaggttcaaagttccagganaggccagggngggatccgagctcggtnccaagcttggcgtaatc

SEQ ID NO: 1201 - DNA, 626 bp, Homo sapiens
  misc_feature 480: n = A,T,C or G
tgggccctctagatgcatgctcgagtggtattatgaggcctcaggtgccttggggtacattgtcatgctataagggatgtatatcataaggtatggtggaagaggggccttatgtgaatgattgccacatactgtttctgttgctgctttttttccgattcctttttgtcattggatttgtttgttttgtcatgtggtgaatggtgttttagttattgtgttgctgccagaatcagaatccagttcttgttcttactgccttatagttattgtgttgccaccagaatcagaatccagttcttgttcatactgccttgtagtgagggcagtttaatatctacaaagaagcttttagaagctgaaaaagtcaatgtgattgtgcattctgcttttaagaagctgtttcagctatgaactgtgtatgtgctataagtgtgaggtaccataagttatttaatttttaaaagaggaaactcctgngtgagctgtttaagaaatctgagtgtgatctattgttacgttatttataactaggtaaaatgtctgtcgtgatagatttcttttaacgttcagatactgtggttgggttgtctatatttaatatgcagatttgcctgctggaatca

SEQ ID NO: 1202 - DNA, 591 bp, Homo sapiens
  misc_feature 327, 377, 452, 543, 582: n = A,T,C or G
cttttttttttttttttttccttttaaagaatttattaagcctgttataccacacagtatgttttatacactgacatacaactccctaataagataaagcaaagacaaaaaagtttatcttattagaaacaagatacaccaccacttattgtcttcaaacattattgcactttaactttcttaatttgacaaagcattcaagaaacatctgcagactagttttaacagacaaataacacctgtaagcagacatgactgtcctaaattgtttattaagtatgaattttacaaactttacttatattagcggtaacggtggagctgganagtattgcgccttctccaagctgcccggcgagagccaccaatagtgtggnggaacttgtggccctttccaaggccacggctctttcggcctgcagatgtcagcccacgcatctccctgtgcttgnggactggtttggtgatccactgggtgtcaggatttcttctgatagctttatggaatggatcaatgaggataacctcaaaaaatttgtatgnggaatcttcaccaacccagtaagaattcaggactctcanagccccaca

SEQ ID NO: 1203 - DNA, 421 bp, Homo sapiens
  misc_feature 6, 36: n = A,T,C or G
tatacnactcactatagggcgaattgggccctctanatgcatgctcgagcaataccagtatctttgggaggaggtccctctactgtcattgagaccagattctcccctcgcagcagcaccagaccgaggactcgcttctcttccctttctgcttgtttggagttctttggcttgatctttctgaactcatcacagtcacagaggatcaaattcatgtgcttgtcaaaagccttgaaggtgccaatgaagatccggccgtcctgcaggatgcacctcatcctgtaatcaatatgctgcagcatcttgctgctcttgcccaccgtcatggtggcggttctgatggctctgatacccgccggattcgcctcctcagaggcctagcctctctcccacagccgatttcccgccggtcgacgcggcc

SEQ ID NO: 1204 - DNA, 410 bp, Homo sapiens
  misc_feature 2, 31: n = A,T,C or G
cnactcatatagggcgaattgggccctctanatgcatgctcgagcaataccagtatctttgggaggaggtccctctactgtcattgagaccagattctcccctcgcagcagcaccagaccgaggactcgcttctcttccctttctgcttgtttggagttctttggcttgatctttctgaactcatcacagtcacagaggatcaaattcatgtgcttgtcaaaagccttgaaggtgccaatgaagatccggccgtcctgcaggatgcacctcatcctgtaatcaatatgctgcagcatcttgctgctcttgcccaccgtcatggtggcggttctgatggctctgatacccgccggattcgcctcctcagaggcctagcctctctcccacagccgatttcgtcgacgcggcc

SEQ ID NO: 1205 - DNA, 548 bp, Homo sapiens; identical to SEQ ID NO: 855

SEQ ID NO: 1206 - DNA, 556 bp, Homo sapiens
  misc_feature 487, 539, 540: n = A,T,C or G
gccaactcacacaaggcaggtgagtgaggaaatccagagttgccatggagaaaaatccagtgtcagcattcttgctccttgtggccctctcctacactctggccagagataccacagtcaaacctggagccaaaaaggacacaaaggactctcgacccaaactgccccagaccctctccagaggttggggtgaccaactcatctggactcagacatatgaagaagctctatataaatccaagacaagcaacaaacccttgatgattattcatcacttggatgagtgcccacacagtcaagctttaaagaaagtgtttgctgaaaataaagaaatccagaaattggcagagcagtttgtcctcctcaatctggtttatgaaacaactgacaaacacctttctcctgatggccagtatgtccccaggattatgtttgttgacccatctctgacagttagagccgatatcactggaagatattcaaaccntctctatgcttacgaacctgcagatacagctctgttgcttgacaacatgaannaagctctcaagttgct

SEQ ID NO: 1207 - DNA, 548 bp, Homo sapiens
  misc_feature 528: n = A,T,C or G
gccaactcacacaaggcaggtgagtgaggaaatccagagttgccatggagaaaaatccagtgtcagcattcttgctccttgtggccctctcctacactctggccagagataccacagtcaaacctggagccaaaaaggacacaaaggactctcgacccaaactgccccagaccctctccagaggttggggtgaccaactcatctggactcagacatatgaagaagctctatataaatccaagacaagcaacaaacccttgatgattattcatcacttggatgagtgcccacacagtcaagctttaaagaaagtgtttgctgaaaataaagaaatccagaaattggcagagcagtttgtcctcctcaatctggtttatgaaacaactgacaaacacctttctcctgatggccagtatgtccccaggattatgtttgttgacccatctctgacagttagagccgatatcactggaagatattcaaaccgtctctatgcttacgaacctgcagatacagctctgttgcttnacaacatgaagaaagctctc

SEQ ID NO: 1208 - DNA, 478 bp, Homo sapiens
  misc_feature 431: n = A,T,C or G
gccaactcacacaaggcaggtgagtgaggaaatccagagttgccatggagaaaaatccagtgtcagcattcttgctccttgtggccctctcctacactctggccagagataccacagtcaaacctggagccaaaaaggacacaaaggactctcgacccaaactgccccagaccctctccagaggttggggtgaccaactcatctggactcagacatatgaagaagctctatataaatccaagacaagcaacaaacccttgatgattattcatcacttggatgagtgcccacacagtcaagctttaaagaaagtgtttgctgaaaataaagaaatccagaaattggcagagcagtttgtcctcctcaatctggtttatgaaacaactgacaaacacctttctcctgatggccagtatgtccccaggattatntttgttgacccatctctgacagttagagccgatatcactggaagata

SEQ ID NO: 1209 - DNA, 516 bp, Homo sapiens
gccaactcacacaaggcaggtgagtgaggaaatccagagttgccatggagaaaaatccagtgtcagcattcttgctccttgtggccctctcctacactctggccagagataccacagtcaaacctggagccaaaaaggacacaaaggactctcgacccaaactgccccagaccctctccagaggttggggtgaccaactcatctggactcagacatatgaagaagctctatataaatccaagacaagcaacaaacccttgatgattattcatcacttggatgagtgcccacacagtcaagctttaaagaaagtgtttgctgaaaataaagaaatccagaaattggcagagcagtttgtcctcctcaatctggtttatgaaacaactgacaaacacctttctcctgatggccagtatgtccccaggattatgtttgttgacccatctctgacagttagagccgatatcactggaagatattcaaaccgtctctatgcttacgaacctgcagatacag

SEQ ID NO: 1210 - DNA, 688 bp, Homo sapiens
  misc_feature 83, 256, 358, 458, 561, 587, 626, 682: n = A,T,C or G
ctatagggcgaattgggccctctagatgcatgctcgagcggccgccctttttttttttttttttttttttttgcctttataanagaatttttattgttaattatttaccttaatagtttcagaaagaggaacaaattagctcagtccaacatgattggcagttggcatattctagtgaagcaagtgttctgactgctaaggatttaatttggataattttaatacttagccatctaacacttcaagcataacccanaataaatgcatcaccttccctttcactttaataccgcacctacctcacttcgatatagaaatatcattcaatatgatttccagaaggacaagtttcctgganaatacaggcatgaggacaatgcacaaaaagaaaaactcaaaataaaactctgtatgataatttactagtctaaggaaacaaaaccttccaatatattaanaaataaatccagttacaaatgcactaataggtctatgtgaagaggttctggtataataactgaaaatggctggctatttacaagatacacaagcagttacggngcacctagcccagcaatggccctcanaagccaaaagtgttctctccgctgtaggccacatataanaatccatcttcatctttttccttctcgaaagctgtcccatagttaggctggactgngggact

SEQ ID NO: 1211 - DNA, 159 bp, Homo sapiens
ctataggggcgaattgggccctctagatgcatgctcgaggtcgcaacttgctggaaacacacacagctccagcaatgcctactcctttctgcgtaggggtgctttggcctgagagaaacacaagagaattcaggacaggagccccttcagccccaggga

SEQ ID NO: 1212 - DNA, 548 bp, Homo sapiens; identical to SEQ ID NO: 855

SEQ ID NO: 1213 - DNA, 135 bp, Homo sapiens
  misc_feature 25, 102, 104, 126, 131: n = A,T,C or G
actatagggcgaattgggccctctngatgcatgctcgagcggccgcccttttttttttttttttttttttttttttttttttttttttttttttttttctgntnaaaaaaacaaaaaaaatttttntttgncaaa

SEQ ID NO: 1214 - DNA, 515 bp, Homo sapiens
  misc_feature 459: n = A,T,C or G
atgcatgctcgagcggccgccctttttttttttttttgagggtacatcgggggagaggagaggagaggagagcctctctgtgccttggtttcccatttgtgcattcagggcctctgcaggcctcacacagggagtctgaggggatagtgtttaagtgagcactcaggcttcctctgaggaaaagaaatgaccaaagtgcagacttttattactgccattcctgctcctaatgggagcaggagtcaaaaggaaaaacaaattaaaaggggctaatgagaaaggaggagagatgagacagagagtgtgaagggctatgccgctggcatctcataaattcttattgagaatggcacaggtattaaaaaagtttctgggtagtctacgagaaatgtcaattattatctctactacaactacttacatatatctaatgggaaaagagtggggcttaggtgtcanagtggatgggagacaaaggagaagctacactaataaatacaacaagtggaaggtac

SEQ ID NO: 1215 - DNA, 501 bp, Homo sapiens
  misc_feature 8: n = A,T,C or G
tacgactnactatagggcgaattgggccctctagatgcatgctcgaggatcaaacagagcatactgaatcagcaggactggctggtggtgcagcagacatcatgagtaagcaccgagaagtctgttccttatcacgtgtgtaaggggaaaaaggtttaaacaagtctcttaagtggtgtttcctcaccgatggagaattacttccaagcagaagcttacaacctggacaaggtgttagatgaatttgaacaaaacgaagatgaaacagtttcttctactttattggatacaaagtggaataagattctagatcccccttctcaccggctgtcatttaaccctactttggccagtgtgaatgaatctgcagtttctaatgagtcacaaccacaactgaaagtcttctccctggctcattcagctcccctgaccacagaggaagaggatcactgtgctaatggacaggactgtaatctaaatccagagattgccacaatgtgg

SEQ ID NO: 1216 - DNA, 128 bp, Homo sapiens
gggccctctagatgcatgctcgagcggccgcccttttttttttttttttttttttttttttttttttttttttttttttactaaaaaaataaagatttttattaaacattgtaagttgcattcattac

SEQ ID NO: 1217 - DNA, 540 bp, Homo sapiens; identical to SEQ ID NO: 447

SEQ ID NO: 1218 - DNA, 569 bp, Homo sapiens
tgggccctctagatgcatgctcgagaagtaattatcagttggtttggatttttggaccaccgttcagtcattttgggttgccgtgctcccaaaacattttaaatgaaagtattggcattcaaaaagacagcagacaaaatgaaagaaaatgagagcagaaagtaagcatttccagcctatctaatttctttagttttctatttgcctccagtgcagtccatttcctaatgtataccagcctactgtactatttaaaatgctcaatttcagcaccgatggccatgtaaataagatgatttaatgttgattttaatcctgtatataaaataaaaagtcacaatgagtttgggcatatttaatgatgattatggagccttagaggtctttaatcattggttcggctgcttttatgtagtttaggctggaaatggtttcacttgctctttgactgtcagcaagactgaagatggcttttcctggacagctagaaaacacaaaatcttgtaggtcattgcacctatctcagccataggtgcagtttgcttctacatgatgctaaaggctgcgaa

SEQ ID NO: 1219 - DNA, 525 bp, Homo sapiens
  misc_feature 471, 473: n = A,T,C or G
gccaactcacacaaggcaggtgagtgaggaaatccagagttgccatggagaaaaatccagtgtcagcattcttgctccttgtggccctctcctacactctggccagagataccacagtcaaacctggagccaaaaaggacacaaaggactctcgacccaaactgccccagaccctctccagaggttggggtgaccaactcatctggactcagacatatgaagaagctctatataaatccaagacaagcaacaaacccttgatgattattcatcacttggatgagtgcccacacagtcaagctttaaagaaagtgtttgctgaaaataaagaaatccagaaattggcagagcagtttgtcctcctcaatctggtttatgaaacaactgacaaacacctttctcctgatggccagtatgtccccaggattatgtttgttgacccatctctgacagttagagccgatatcactngnagatattcaaaccgtctctatgcttacgaacctgcagatacagctctgttgc

SEQ ID NO: 1220 - DNA, 547 bp, Homo sapiens; identical to SEQ ID NO: 939

SEQ ID NO: 1221 - DNA, 598 bp, Homo sapiens
  misc_feature 29: n = A,T,C or G
actcactatagggcgaattgggccctctngatgcatgctcgagcaccgtcattaccccgagcacctgcagccccaggaagtcctggccgtcctcgctcaccaggagcccctcttggacccatgggtccaggagctccattttcgcctggaagaccattttcaccctttaatccaggagcacctgtttcacccttttctccatttcgtccatcgaagcctctgtgtcctttcataccagggaatccaggtatcccagctggacctttgatacctggaggtccaggcaatcctcgctctccaggtcgtccgggtctacctgattctccatcttttccagcaggaccagatggacctatagcaccaggaggtcctggagggcctgaaggaccagcttgcccaggttcaccagggggtccttggtatcctggagatccaggggaaccaggatgaccagatgtaccagggggaccgggagggcctggggggccagctggtccaggatagcctgcgagtcctcctactgctactccagacttgacatcatatgaatcatactggggagaatagttctgaggaccagtagggcatgattcacaga

SEQ ID NO: 1222 - DNA, 539 bp, Homo sapiens; identical to SEQ ID NO: 957

SEQ ID NO: 1223 - DNA, 548 bp, Homo sapiens; identical to SEQ ID NO: 855

SEQ ID NO: 1224 - DNA, 610 bp, Homo sapiens
  misc_feature 24, 558, 596: n = A,T,C or G
ctatagggcgaattgggccctctngatgcatgctcgagcaccgtcattaccccgagcacctgcagccccaggaagtcctggccgtcctcgctcaccaggagcccctcttggacccatgggtccaggagctccattttcgcctggaagaccattttcaccctttaatccaggagcacctgtttcacccttttctccatttcgtccatcgaagcctctgtgtcctttcataccagggaatccaggtatcccagctggacctttgatacctggaggtccaggcaatcctcgctctccaggtcgtccgggtctacctgattctccatcttttccagcaggaccagatggacctatagcaccaggaggtcctggagggcctgaaggaccagcttgcccaggttcaccagggggtccttggtatcctggagatccaggggaaccaggatgaccagatgtaccagggggaccgggagggcctggggggccagctggtccaggatagcctgcgagtcctcctactgctactccagacttgacatcatatgaatcatactggggagnatagttctgaggaccagtagggcatgattcacagattncaggggggccagga

SEQ ID NO: 1225 - DNA, 212 bp, Homo sapiens
ttgggccctctagatgcatgctcgagaggcggagaggatcatgtccgggaactgcggggtagtagcgatctgggttacccagccgttgtggcccttgagggtgccacgaagggtcatctgctcagtcatggcggcggcgagagcgtgtgtcgctgcagcgacgaggatggcactggatggcttagagaaactagcaccacgtcgacgcggcc

SEQ ID NO: 1226 - DNA, 556 bp, Homo sapiens; identical to SEQ ID NO: 896

SEQ ID NO: 1227 - DNA, 607 bp, Homo sapiens
  misc_feature 5: n = A,T,C or G
gactnactatagggcgaattgggccctctagatgcatgctcgagtcggccagctggatctcccacaaggtttccttgttaaaagggtgcttaagtaacctggccggcagcacgacttatgatgaagcacgaagaagccaggttctgtgtcgatcactctctcagtcccctcaactgctcatcttaaactatttggttcctgacacgtttccaaaaggggaaaggggaaaaggggaaggggggaaggggaacataaaaagtatttgttacatttaaaaagggggggaaggggaaagagctgtatctatgttcacctcattcaacttccttgagttatggcactatgatgttgcttaattaggtaagacatggatatttgcaccgagtgcaaatactgttcataacaaggtcatagctagaaagacagatgggctcaagtgtggacaaataatgtcatcaaggtaatagatcaaaaatattaaagccctataaaagatctgagcagtcaactccaaaacatccacatgacaaagtccttaaaatacaaatctcattactcttactcatgcaactgctaaaaaatagtgtgcagatatgtatttatattt

SEQ ID NO: 1228 - DNA, 529 bp, Homo sapiens; identical to SEQ ID NO: 407

SEQ ID NO: 1229 - DNA, 237 bp, Homo sapiens; identical to SEQ ID NO: 409

SEQ ID NO: 1230 - DNA, 538 bp, Homo sapiens
gcatgctcgagaaaagactatctctgcacctctgccctatgaggcgctcactcagctgatagatgaagccagtgaaggggatatgagcatttcaatccttacacaggaaataatggtatatctagccatgtatatgcgaacccagcctggcctctttgctgaaatgtttcgacttcgaattggtctgatcatacaagttatggcaacagaactggcccactcccttcgatgctcagctgaggaagccacagagggcctgatgaatctcagtccttcggccatgaagaatctcctgcatcacattctcagcggcaaggagtttggagtggaacgaagcgttcgtcccactgattcaaatgtcagtcctgctatttctatccacgagattggtgctgttggagcaaccaaaacagaacgaactgggatcatgcagttaaaaagtgagataaagcagtcacctggaacctctatgactccaagtagtgggtcctttcctagtgcatatgatcagcagtcatctaaagatagtcgtcaaggt

SEQ ID NO: 1231 - DNA, 506 bp, Homo sapiens
gccaactcacacaaggcaggtgagtgaggaaatccagagttgccatggagaaaaatccagtgtcagcattcttgctccttgtggccctctcctacactctggccagagataccacagtcaaacctggagccaaaaaggacacaaaggactctcgacccaaactgccccagaccctctccagaggttggggtgaccaactcatctggactcagacatatgaagaagctctatataaatccaagacaagcaacaaacccttgatgattattcatcacttggatgagtgcccacacagtcaagctttaaagaaagtgtttgctgaaaataaagaaatccagaaattggcagagcagtttgtcctcctcaatctggtttatgaaacaactgacaaacacctttctcctgatggccagtatgtccccaggattatgtttgttgacccatctctgacagttagagccgatatcactggaagatattcaaaccgtctctatgcttacgaacct

SEQ ID NO: 1232 - DNA, 552 bp, Homo sapiens
  misc_feature 5, 6, 29, 84, 194, 350, 510: n = A,T,C or G
cgaannctatagggcgaattgggccctcnagatgcatgctcgagcggccgccctttttttttttttttttagaatatataatangatcccatttatttaaaaaataaagattacatatttgcttatatacgcatacaaattttctgaaaattacataagaaattgttaatagattacctctggagaatagtacntggggtaagaggtgagggggcagaattctcattttacagccttatatactgttgtgaatttttttttttaccatgtactttttaaaaatacaaaattgaggagggaacctcctactccaaaattacgaagcattcttttatgtacatttctctaanagttatatttgatatttttcaaggcaaactgacttgaggtactcgatgtttttaaatgtatttctaataattattagtagggtcacacctatttgacagcttttttaaaaagtcacatattgctgtatttttaaagatgacaaacctttatttaaatganatgcttgctggagattttctttttcaaactcactttttaagt

SEQ ID NO: 1233 - DNA, 613 bp, Homo sapiens
  misc_feature 26: n = A,T,C or G
cactatagggcgaattgggccctctngatgcatgctcgagcaccgtcattaccccgagcacctgcagccccaggaagtcctggccgtcctcgctcaccaggagcccctcttggacccatgggtccaggagctccattttcgcctggaagaccattttcaccctttaatccaggagcacctgtttcacccttttctccatttcgtccatcgaagcctctgtgtcctttcataccagggaatccaggtatcccagctggacctttgatacctggaggtccaggcaatcctcgctctccaggtcgtccgggtctacctgattctccatcttttccagcaggaccagatggacctatagcaccaggaggtcctggagggcctgaaggaccagcttgcccaggttcaccagggggtccttggtatcctggagatccaggggaaccaggatgaccagatgtaccagggggaccgggagggcctggggggccagctggtccaggatagcctgcgagtcctcctactgctactccagacttgacatcatatgaatcatactggggagaatagttctgaggaccagtagggcatgattcacagattccaggggggccaggag

SEQ ID NO: 1234 - DNA, 451 bp, Homo sapiens
  misc_feature 413, 442, 444: n = A,T,C or G
gatgcatgctcgagcggccgccctttttttttttttttacactcagattgtttatttaaaaatgcccaaaacacaaaaatagacttttaaggtaataatatatattactaaatatattatagtctacttataataattatatcgtcgttttcaatattacaaaaaaaggaagaaaaatacaagggaagcagacgacccaatatatataaatactataaaatcatattagaataaataaagtcgtcataaataaagggcccattgatttatgggtggggtttggcaacggctttggctacttgcttttggagggtaatttgagcaccaggattccccctcaggagaggttccagttaccaggagacactggaacctcaggtctataaaaactggaggggcagtgaaggcctatngttcacagcacataagattctaggagacngntttgggc

SEQ ID NO: 1235 - DNA, 529 bp, Homo sapiens
  misc_feature 482: n = A,T,C or G
gccaactcacacaaggcaggtgagtgaggaaatccagagttgccatggagaaaaatccagtgtcagcattcttgctccttgtggccctctcctacactctggccagagataccacagtcaaacctggagccaaaaaggacacaaaggactctcgacccaaactgccccagaccctctccagaggttggggtgaccaactcatctggactcagacatatgaagaagctctatataaatccaagacaagcaacaaacccttgatgattattcatcacttggatgagtgcccacacagtcaagctttaaagaaagtgtttgctgaaaataaagaaatccagaaattggcagagcagtttgtcctcctcaatctggtttatgaaacaactgacaaacacctttctcctgatggccagtatgtccccaggattatgtttgttgacccatctctgacagttagagccgatatcactggaagatattcnaaccgtctctatgcttacgaacctgcagatacagctctgttgcttga

SEQ ID NO: 1236 - DNA, 529 bp, Homo sapiens; identical to SEQ ID NO: 407

SEQ ID NO: 1237 - DNA, 503 bp, Homo sapiens
  misc_feature 85, 87, 112, 149, 157, 160, 167, 173, 175, 222, 239, 265,271, 310, 336, 343, 351, 416, 426, 442, 472, 476: n = A,T,C or G
cgactactatagggcgaattgggccctctagatgcatgctcgagcggccgccctttttttttttttttttttttttttttttttngnctaaattaattgtttattgagccanaccttgagggtacaccctaggaaaacacaagtcacanaaaacctntgnggcttgngttctntntgaagaggttttcaggaggccttaaaggggggaaggcaggtaggaanaggcgggtaggtggaanaatgattgttcttgtctttgttctgngcctanaaagataagcattatcagcctgaaatcctaaggactaanactaaagccttaggaaccagacttanatttcanaactgaanatacaatcgacatgtccttgttatatggggggatatacatcttaaaaattttaaggccagcaaanaacaatttgngagggcagtcatccanaaatacctaaggccttttgctttcctatanaggnctgtttaatgtacaatgttttgacaca

SEQ ID NO: 1238 - DNA, 372 bp, Homo sapiens
  misc_feature 193: n = A,T,C or G
ctttttttttttttttttggctctagagggggtagagggggtgctatagggtaaatacgggccctatttcaaagatttttaggggaattaattctaggacgatgggcatgaaactgtggtttgctccacagatttcagagcattgaccgtagtatacccccggtcgtgtagcggtgaaagtggtttggtttanacgtccgggaattgcatctgtttttaagcctaatgtggggacagctcatgagtgcaagacgtcttgtgatgtaattattatacgaatgggggcttcaatcgggagtactactcgattgtcaacgtcaaggagtcgcaggtcgcctggttctaggaataatgggggaagtatgtaggagt

SEQ ID NO: 1239 - DNA, 494 bp, Homo sapiens
gccaactcacacaaggcaggtgagtgaggaaatccagagttgccatggagaaaaatccagtgtcagcattcttgctccttgtggccctctcctacactctggccagagataccacagtcaaacctggagccaaaaaggacacaaaggactctcgacccaaactgccccagaccctctccagaggttggggtgaccaactcatctggactcagacatatgaagaagctctatataaatccaagacaagcaacaaacccttgatgattattcatcacttggatgagtgcccacacagtcaagctttaaagaaagtgtttgctgaaaataaagaaatccagaaattggcagagcagtttgtcctcctcaatctggtttatgaaacaactgacaaacacctttctcctgatggccagtatgtccccaggattatgtttgttgacccatctctgacagttagagccgatatcactggaagatattcaaaccgtctctat

SEQ ID NO: 1240 - DNA, 635 bp, Homo sapiens
atagggcgaattgggccctctagatgcatgctcgagcggccgcgtcgacccaagttgtgtcctgtcagccgctgtccccttcgccgcgatgccgctggagaacctggaggaggagggtctgcccaagaaccccgacttgcgtatcgcgcagctgcgcttcctgctcagcctgcccgagcaccgcggagacgctgccgtgcgcgacgagctgatggcggccgtccgcgataacaacttttggaacagaatccggcaagagcaaaccgaggattgccctccctccagccctagtagaggttggcattgccaggattggccgtcacgcaaacctcccaccagcatacgtttatgttttgccaagccgattattaagcgccatcgcatgccttcctacatggctccttactatgaagccttgtgcaaatccctcgactggcagatagacgtggacctactcaataaaatgaagaaggcaaatgaagatgagttgaagcgtttggatgaggagctggaagatgcagagaagaatctaggagagagcgaaattcgcgatgcaatgatggcaaaggccgagtacctctgccggataggtgacaaagagggagctctgacagcctttcgcaagacatatgaca

SEQ ID NO: 1241 - DNA, 505 bp, Homo sapiens
gccaactcacacaaggcaggtgagtgaggaaatccagagttgccatggagaaaaatccagtgtcagcattcttgctccttgtggccctctcctacactctggccagagataccacagtcaaacctggagccaaaaaggacacaaaggactctcgacccaaactgccccagaccctctccagaggttggggtgaccaactcatctggactcagacatatgaagaagctctatataaatccaagacaagcaacaaacccttgatgattattcatcacttggatgagtgcccacacagtcaagctttaaagaaagtgtttgctgaaaataaagaaatccagaaattggcagagcagtttgtcctcctcaatctggtttatgaaacaactgacaaacacctttctcctgatggccagtatgtccccaggattatgtttgttgacccatctctgacagttagagccgatatcactggaagatattcaaaccgtctctatgcttacgaacc

SEQ ID NO: 1242 - DNA, 567 bp, Homo sapiens
agatgcatgctcgagcggccgcccttttttttttttttttactttgacaacaaattatattttaaatgtttcatatttacttttatatttccatacaatcagaaacagtaaaaaaaatttggagagcacataaaaacatcttaaagttaaaaatataaagccttgtatttaaaaatgcagtcatttaaataatattataagaatctatttgtacataataaacaagtttcaaccagcaagaaattactaatattgactgtggagttttggctgttttaatagttctaactcattattccgtaattcaacacagcactaccaacacagctggcaatgacaagactgggagtatcaaactaggattgttagttcaattaaaatttcagataaacaataatgtacttatactaaaaaattatttgttgtttatctgaaatgaaaatttaactgggtacccaattgtttgtttgtttaatctaaaaaccctgattgaaatttatctaataaaacatcatttaatatctaaaataaaataaatttactataacatctttataactattcaat

SEQ ID NO: 1243 - DNA, 162 bp, Homo sapiens
  misc_feature 108, 111, 116, 135, 158, 162: n = A,T,C or G
actatagggcgaatgggccctctagatgcatgctcgagcggccgcgtcgaccctttttttttttttttttttttttttttttttttttttttttttttttaaactcanatngtttntttaaaaatgcccaaaacncaaaaatagacttttaagggaanaatn

SEQ ID NO: 1244 - DNA, 642 bp, Homo sapiens
actatagggcgaattgggccctctagatgcatgctcgagcggccgcccttttttttttttttttactttgacaacaaattatattttaaatgtttcatatttacttttatatttccatacaatcagaaacagtaaaaaaaatttggagagcacataaaaacatcttaaagttaaaaatataaagccttgtatttaaaaatgcagtcatttaaataatattataagaatctatttgtacataataaacaagtttcaaccagcaagaaattactaatattgactgtggagttttggctgttttaatagttctaactcattattccgtaattcaacacagcactaccaacacagctggcaatgacaagactgggagtatcaaactaggattgttagttcaattaaaatttcagataaacaataatgtacttatactaaaaaattatttgttgtatatctgaaatgaaaatttaactgggtacccaattgtttgtttgtttaatctaaaaaccctgattgaaatttatctaataaaacatcatttaatatctaaaataaaataaatttactataacatctttataactattcaatcaatgattcatcttctatttttccaaattcttgcacaaatatttgatgctt

SEQ ID NO: 1245 - DNA, 532 bp, Homo sapiens
  misc_feature 31, 32, 270, 297, 488, 489, 490: n = A,T,C or G
cgactcactatagggcgaattgggccctctnnatgcatgctcgagcggccgccctttttttttttttttttttgcagttatttttaaaactttattttaaaaatatgagcatctattttaaaagttttgataattattgccattattttcttgtgattggtacaatttaaaaataagtctatgttttcacattgattttaaaaaatatagcatgtttgaattacaaatgattaagcaaactctattacttcatagctgaccatcttccanaaaattcccacttaattgaatacttanaaaaaaatggccagtggccgattgaaaggtatattaaaattaagggcagttttaattctgaagacaaatatcttcatggaaatctatttgtaagcttctgagattgctgctgaaagtctacagtctgtgaatataccaattcccctttacaactgatgcagatcattatgaaatactggaaggcatacccnnnaatttaggaattggtgtggctgccactgctatgctctcaatt

SEQ ID NO: 1246 - DNA, 69 bp, Homo sapiens
tgggccctctagatgcatgctcgagcgcatctgcccgccctagtcggggaagagcaggaagccggagaa

SEQ ID NO: 1247 - DNA, 621 bp, Homo sapiens
  misc_feature 325: n = A,T,C or G
ctatagggcgaattgggccctctagatgcatgctcgagtcggccagctggatctcccacaaggtttccttgttaaaagggtgcttaagtaacctggccggcagcacgacttatgatgaagcacgaagaagccaggttctgtgtcgatcactctctcagtcccctcaactgctcatcttaaactatttggttcctgacacgtttccaaaaggggaaaggggaaaaggggaaggggggaaggggaacataaaaagtatttgttacatttaaaaagggggggaaggggaaagagctgtatctatgttcacctcattcaacttccttgngttatggcactatgatgttgcttaattaggtaagacatggatatttgcaccgagtgcaaatactgttcataacaaggtcatagctagaaagacagatgggctcaagtgtggacaaataatgtcatcaaggtaatagatcaaaaatattaaagccctataaaagatctgagcagtcaactccaaaacatccacatgacaaagtccttaaaatacaaatctcattactcttactcatgcaactgctaaaaaatagtgtgcagatatgtatttatatttgccttaaccttcaaaatcta

SEQ ID NO: 1248 - DNA, 89 bp, Homo sapiens
  misc_feature 71: n = A,T,C or G
tgggccctatagatgcatgctcgagcggccgcccttttttttttttttttttttttttttttttttttttngaaaaagtcatggaggcc

SEQ ID NO: 1249 - DNA, 471 bp, Homo sapiens
  misc_feature 27, 75, 280, 429: n = A,T,C or G
gactactatagggcgaattgggccctntagatgcatgctcgagcggccgcccttttttttttttttttgaagaanaaaatcctttattttttgatgagcaaaaataataaattgctgttcacactggataagaccatatcaaaagtgacagtaaacatgtacactgttggtgttatatggggatggggttctcggtaattttgtttattatttatgtttattattatgttttatcattaattattcaataaatttttatttaaaaagtcaccctacttanaaatcttctgtgggggtgggagggacaaaagattacaaaccaaaactcaggagatggtaacactggaattgataaaatcacctgggattagttgtataactctgaaccaccaaacctctgctatcaagccttgctacagtcatggctgnccagaaagatttacagttatttttctgagaaaggatccgagc

SEQ ID NO: 1250 - DNA, 547 bp, Homo sapiens
gccaactcacacaaggcaggtgagtgaggaaatccagagttgccatggagaaaaatccagtgtcagcattcttgctccttgtggccctctcctacactctggccagagataccacagtcaaacctggagccaaaaaggacacaaaggactctcgacccaaactgccccagaccctctccagaggttggggtgaccaactcatctggactcagacatatgaagaagctctatataaatccaagacaagcaacaaacccttgatgattattcatcacttggatgagtgcccacacagtcaagctttaaagaaagtgtttgctgaaaataaagaaatccagaaattggcagagcagtttgtcctcctcaatctggtttatgaaacaactgacaaacacctttctcctgatggccagtatgtccccaggattatgtttgttgacccatctctgacagttagagccgatatcactggaagatattcaaaccgtctctatgcttacgaacctgcagatacagctctgttgcttgacaacatgaagaaagctct

SEQ ID NO: 1251 - DNA, 553 bp, Homo sapiens
  misc_feature 450: n = A,T,C or G
ctttttttttttttttttttacactcagattgtttatttaaaaatgcccaaaacacaaaaatagacttttaaggtaataatatatattactaaatatattatagtctacttataataattatatcgtcgttttcaatattacaaaaaaaggaagaaaaatacaagggaagcagacgacccaatatatataaatactataaaatcatattagaataaataaagtcgtcataaataaagggcccattgatttatgggtggggtttggcaacggctttggctacttgcttttggagggtaatttgagcaccaggattccccctcaggagaggttccagttaccaggagacactggaacctcaggtctataaaaactggaggggcagtgaaggcctattattcacagcacataagattctaggagacagatttgggcagggaagaggtgggggnagagggttcattgcctcccttaaatatgctacaattttttttcccccaagaacctcggaagacactccatcccccaccatcatgaatactgagccttgcacac

SEQ ID NO: 1252 - DNA, 550 bp, Homo sapiens
  misc_feature 24, 78, 416, 500, 511, 531: n = A,T,C or G
ctatagggcgaattgggccctctngatgcatgctcgagcggccgccctttttttttttttttttgctttgaaatttanaaacaaattttatttaagatctgaaatacaattcctaaaatatcaacttttccagaaaaccgtggctacacaataatgcattgcctctatcatgttagaacgtgcattagactcaaatacaaaaaccatgaaacaaatcaccatccttcaacaatttgagcaaagatagaatgcctaagaacaacatagatggacttgcagaggatgggctgttttacttcaagcaccataaaaaaaaaaaagagcacaaatgcatgggttttcaggtatatacattaagttgaacctttggcactaggaatcagggcgttttgtcacatagcattaacacatattanaaaattgtgtagtgtcaaagggataggaaccaccagcattcaagcaatgttgtcaactaggcaataaaatgttctactgaatgnttcttctttgntctaattactgcatacactngtagcaactttgaaatgag

SEQ ID NO: 1253 - DNA, 529 bp, Homo sapiens; identical to SEQ ID NO: 407

SEQ ID NO: 1254 - DNA, 501 bp, Homo sapiens
  misc_feature 6: n = A,T,C or G
cgactnactatagggcgaattgggccctctagatgcatgctcgaggtgaagttttaaaaaaaaagttgtggaaaggaaagttccaaagaggtggtttctgaggaagtcagagcgcccagggccagagcagtcagtaatgggtgaatgaggttgtttggaaagtcggtgtgacagacacatggatgccatctacttctaggttgctggtgggtattaaatatgcacaatattccatagctcactgaggattttaaaattataagcataggattttatattttggggtgaaagaattatctggcacattaggtattggagtttaaaaaaaaagccaaatttcacagtcttaataactttttttaaaaaaaactaaaaggcgcttcatgtccagtgtgtggcccttctgaaacttatggtcatctctcccactgaaaccaaggtcttttcaaatgtggctaaatggggatgaggagacacgggtaggactttcttggtgtgtgt

SEQ ID NO: 1255 - DNA, 171 bp, Homo sapiens
gccaactcacacaaggcaggtgagtgaggaaatccagagttgccatggagaaaaatccagtgtcagcattcttgctccttgtggccctctcctacactctggccagagataccacagtcaaacctggagccaaaaaggacacaaaggactctcgacccaaactgccccaga

SEQ ID NO: 1256 - DNA, 152 bp, Homo sapiens
gcatgctcgagtgatgtgggcgattgatgaaaaggcggttgaggcgtctggtgagtagtgcatggctaggaatagtcctgtggtgatttggagaatcaggcaggcgccaaggagtgagccgaagtttcatcatgtggagatgttggatgggc

SEQ ID NO: 1257 - DNA, 524 bp, Homo sapiens
gccaactcacacaaggcaggtgagtgaggaaatccagagttgccatggagaaaaatccagtgtcagcattcttgctccttgtggccctctcctacactctggccagagataccacagtcaaacctggagccaaaaaggacacaaaggactctcgacccaaactgccccagaccctctccagaggttggggtgaccaactcatctggactcagacatatgaagaagctctatataaatccaagacaagcaacaaacccttgatgattattcatcacttggatgagtgcccacacagtcaagctttaaagaaagtgtttgctgaaaataaagaaatccagaaattggcagagcagtttgtcctcctcaatctggtttatgaaacaactgacaaacacctttctcctgatggccagtatgtccccaggattatgtttgttgacccatctctgacagttagagccgatatcactggaagatattcaaaccgtctctatgcttacgaacctgcagatacagctctgttg

SEQ ID NO: 1258 - DNA, 94 bp, Homo sapiens
ctatagggcgaattgggccctctagatgcatgctcgagcggccgccctttttttttttttttttttttttttttttttttttttttttttttcc

SEQ ID NO: 1259 - DNA, 534 bp, Homo sapiens
gccaactcacacaaggcaggtgagtgaggaaatccagagttgccatggagaaaaatccagtgtcagcattcttgctccttgtggccctctcctacactctggccagagataccacagtcaaacctggagccaaaaaggacacaaaggactctcgacccaaactgccccagaccctctccagaggttggggtgaccaactcatctggactcagacatatgaagaagctctatataaatccaagacaagcaacaaacccttgatgattattcatcacttggatgagtgcccacacagtcaagctttaaagaaagtgtttgctgaaaataaagaaatccagaaattggcagagcagtttgtcctcctcaatctggtttatgaaacaactgacaaacacctttctcctgatggccagtatgtccccaggattatgtttgttgacccatctctgacagttagagccgatatcactggaagatattcaaaccgtctctatgcttacgaacctgcagatacagctctgttgcttgacaaca

SEQ ID NO: 1260 - DNA, 585 bp, Homo sapiens
ctttttttttttttttttttttactttgacaacaaattatattttaaatgtttcatatttacttttatatttccatacaatcagaaacagtaaaaaaaatttggagagcacataaaaacatcttaaagttaaaaatataaagccttgtatttaaaaatgcagtcatttaaataatattataagaatctatttgtacataataaacaagtttcaaccagcaagaaattactaatattgactgtggagttttggctgttttaatagttctaactcattattccgtaattcaacacagcactaccaacacagctggcaatgacaagactgggagtatcaaactaggattgttagttcaattaaaatttcagataaacaataatgtacttatactaaaaaattatttgttgtatatctgaaatgaaaatttaactgggtacccaattgtttgtttgtttaatctaaaaaccctgattgaaatttatctaataaaacatcatttaatatctaaaataaaataaatttactataacatctttataactattcaatcaatgattcatcttctatttttccaaattcttgcac

SEQ ID NO: 1261 - DNA, 182 bp, Homo sapiens
atgcatgctcgagcggccgccctttttttttttttttgttttagttcagtttattttttaatatgtcctgagttctttctgttcataaaattatgatcttatgacagctgtaacttttaattaataatattaacaaatcattattgatataggcttttcaatttgctcaagattaggaattg

SEQ ID NO: 1262 - DNA, 248 bp, Homo sapiens; identical to SEQ ID NO: 432

SEQ ID NO: 1263 - DNA, 637 bp, Homo sapiens
  misc_feature 33, 34: n = A,T,C or G
tacgactcactatagggcgaattgggccctctnnatgcatgctcgagagagctacctttttccttttatgtataaggacacagctagaaaatgccatgtatgatccagaggcctaatttgttgatcccttaatcttggacttcccaccattgagaacagcgagaaataaatttctgttgtttataagctgccaagttcatagtatttcattacagcagcctgcacagaccaaggcagtatttttttttaatgtcttctaagggaacccccccaaaagtaaacaaaaatctacaaaagttatttgtatgatcaaaatcaaaacattcttattcacgaaatagaagctacagtaaattttcaaaaaataagagttaaaaaactccccccatatgatatattttacagtttcacaagggtaccaggtcgtgaaggaattttattaaatctattaaatcatagatagcttttaataagttcaattttactttaagagctaataagttacttgatattaacctttttacttataaggtaagtgggagatatgacatcataatcttagacatttaaaaaatcctgagaaagattatttcaatcttttacagtttgggatccgagctcggtaccaagcttggcg

SEQ ID NO: 1264 - DNA, 330 bp, Homo sapiens
  misc_feature 40, 81, 136, 146, 207, 221, 306: n = A,T,C or G
gcatgctcgagcggccgcccttttttttttttttttatanagctaattggcttttatttgtgatttatgaataaaagcagnaccactctacaagtacagtgatagctccccctgggcaatacaatacaagaacagngggttttgtnaaattggaacaaggaaacagaaccacagaaataaatacattggttaacatcaaattagttnaggttacttttttntaaaagttaaagtagaggggacttctgtattatgctaactcaagtagactggaatctcctgtgttctttttttttttaaattggntttaattttttttaattggatcta

SEQ ID NO: 1265 - DNA, 623 bp, Homo sapiens
  misc_feature 571: n = A,T,C or G
gccaactcacacaaggcaggtgagtgaggaaatccagagttgccatggagaaaaatccagtgtcagcattcttgctccttgtggccctctcctacactctggccagagataccacagtcaaacctggagccaaaaaggacacaaaggactctcgacccaaactgccccagaccctctccagaggttggggtgaccaactcatctggactcagacatatgaagaagctctatataaatccaagacaagcaacaaacccttgatgattattcatcacttggatgagtgcccacacagtcaagctttaaagaaagtgtttgctgaaaataaagaaatccagaaattggcagagcagtttgtcctcctcaatctggtttatgaaacaactgacaaacacctttctcctgatggccagtatgtccccaggattatgtttgttgacccatctctgacagttagagccgatatcactggaagatattcaaaccgtctctatgcttacgaacctgcagatacagctctgttgcttgacaacatgaagaaagctctcaagttgctgaagactgaattgtnaagaaaaaaatctccaagcccttctgtctgtcaggccttgagacttgaaacc

SEQ ID NO: 1266 - DNA, 551 bp, Homo sapiens
  misc_feature 505: n = A,T,C or G
ctttttttttttttttttttacactcagattgtttatttaaaaatgcccaaaacacaaaaatagacttttaaggtaataatatatattactaaatatattatagtctacttataataattatatcgtcgttttcaatattacaaaaaaaggaagaaaaatacaagggaagcagacgacccaatatatataaatactataaaatcatattagaataaataaagtcgtcataaataaagggcccattgatttatgggtggggtttggcaacggctttggctacttgcttttggagggtaatttgagcaccaggattccccctcaggagaggttccagttaccaggagacactggaacctcaggtctataaaaactggaggggcagtgaaggcctattattcacagcacataagattctaggagacagatttgggcagggaagaggtgggggagagggttcattgcctcccttaaatatgctacaattttttttcccccaagaacctnggaagacactccatcccccaccatcatgaatactgagcttgcacac

SEQ ID NO: 1267 - DNA, 559 bp, Homo sapiens
gtcgacgatattttagtgcttcaagactgctgaaagcaatccagttgctcctgtgctagatggtagccagagaattttatagtaatggaggttagcccttaatctcttcattgcatttcatttctgtaaatcagattaagtccttaatattattttaaattaaaatttgtgtgtaattgccattaaattttcaaaatgtaatttaaaaggattaaatactcatttaataatttaaaataattattgtataatatctacatttggagaattttgaactatcaagcatatactgtatacagttagaaagttattaaatgaacattttactcattgatctgtaaaaacttctttaatctacaactgtttacaaaaacaacattcaaacaaatagtacagatgtcagtgacagaacaaaatgacttttcttggagacattccagattgccatattactttattttaaacagcgctatgactttaaatccaaggctgctcggaagatttttttaggtctctcataagcctattcttccctgatcacatgagtgggagaggtagc

SEQ ID NO: 1268 - DNA, 657 bp, Homo sapiens
  misc_feature 654: n = A,T,C or G
cactatagggcgaattgggccctctagatgcatgctcgagcggccgcgtcgacttttttttttatagatacaattggcttttatttgtgattcatgagtcagggcagtttccattctgcaaaatatagtgatagctcctactgggcaatacaacagtagaacagtgggttttgtaaaatgggaatccaggaacagaagaatataaataaattgatttaaataaactgattggttaatttcagaatacttcatattacttttttctaagagttaaagcagaaaggactttcttactgtgctgactcagacagcctggactctcatgtttttaggaaaattttgtctgttctgggatctacctgcttcctcatgtttcagtgtgagtatatggcatttagcatgactggctccattctggagtcaccaggctgtcacctaaatgagagtttgactaaacataaggcattaacactactgtcagttaccatcattttggacttccatcattcataggttatgatgtcctcctaatcatacatttatttgagtttttgtcattccagccaaagagagaatatttgacatttgacgaatggctgcatgcaaacatttaaaggttttagagaatacagcacaccagggtaactaatattntga

SEQ ID NO: 1269 - DNA, 603 bp, Homo sapiens
  misc_feature 543: n = A,T,C or G
ctttttttttttttttagagctaattggcttttatttgtgatttatgaattaaagcagcaccactctacaagtacagtgatagctccccctgggcaatacaatacaagaacagtgggttttgtcaaattggaacaaggaaacagaaccacagaaataaatacattggttaacatcagattagttcaggttacttttttgtaaaagttaaagtagaggggacttctgtattatgctaactcaagtagactggaatctcctgtgttctttttttttttaaattggttttaattttttttaattggatctatcttcttccttaacatttcagttggagtatgtagcatttagcaccactggctcaatgcgctcacctaggtgagagtgtgaccaaatcttaaagcattagtgctattatcagttaccaccatttggggcttttatccttcatgggttatgatgttctcctgatgacacatttctctgagttttgtaattccagccaaagagagaccattcactatttgatggctggctgcatgcanacatttaaagcttttagagaatacactacaccagggagtatgactactagtatgactatt

SEQ ID NO: 1270 - DNA, 614 bp, Homo sapiens
  misc_feature 11: n = A,T,C or G
tgggccctctnatgcatgctcgagcggccgccctttttttttttttttttttagtcccttaaaaataatttactttattacaaagatagtaatacaatttctagaaaatacatgcatgtacaaagattgaaataaaaaaaacactcataaatatccagatttaaatgtcagcatataccttcctgatctttttctatcatactgtatctatcaacatctaacctgcttttttaactataagtcatacattttgccatatcagtacacttttttctgtaacattatttttagagcatatcaaaccatagtttatttaaccaatccccaattaattcataattagaatatttcgtgtttttccagtataacagttctataatctttgattataacctttgtgtaaattcctataagtattgagtcaaaggagacacacatcttttcaggcattacatataaaataaatactaaactagactccaggaaagtggtatcaattcacattcccaatagcactgtcccaatggggctaatttatctcctttttaatctcagcgtatttccagttataacataccatttttacctcttgattcaacaattggacttagaag

SEQ ID NO: 1271 - DNA, 606 bp, Homo sapiens
  misc_feature 233, 314: n = A,T,C or G
ctatagggcgaattgggccctctagatgcatgctcgagcggccgccctttttttttttttttaacagcattttaaccaaatataatgaagggtctagaatgtttgtatccccctgaaatttgtaggttgaaatcctcacccccaagatgatggcatcaaaaagtggtgcctttgtgagattattaggtcctgggggcagaatcctcctgaatgagattagttaagagacccangggcgcttgtttgccccttccaacatgggaggacccagttagaaggcaccatctatgaatcaaaaagcaggctgtcaccanacaccaaatctacggcatcttggtcttgaacttctgggcctccagagaaataaaattctctggaattttatttataagccacccagtctaaaacattctgttatagctgcctaaatggcctaagacatatatgaatacataaaaatattttgttctatacttgttaattctagtttgagatcaaaatatttcattagataggtttaataaaattaaaatgagcaaaaatagaaaagaaatccaaaatagaagacaaaatagtttaaagatcgactactttctgcctttagag

SEQ ID NO: 1272 - DNA, 548 bp, Homo sapiens; identical to SEQ ID NO: 855

SEQ ID NO: 1273 - DNA, 650 bp, Homo sapiens
  misc_feature 644: n = A,T,C or G
gccaactcacacaaggcaggtgagtgaggaaatccagagttgccatggagaaaaatccagtgtcagcattcttgctccttgtggccctctcctacactctggccagagataccacagtcaaacctggagccaaaaaggacacaaaggactctcgacccaaactgccccagaccctctccagaggttggggtgaccaactcatctggactcagacatatgaagaagctctatataaatccaagacaagcaacaaacccttgatgattattcatcacttggatgagtgcccacacagtcaagctttaaagaaagtgtttgctgaaaataaagaaatccagaaattggcagagcagtttgtcctcctcaatctggtttatgaaacaactgacaaacacctttctcctgatggccagtatgtccccaggattatgtttgttgacccatctctgacagttagagccgatatcactggaagatattcaaaccgtctctatgcttacgaacctgcagatacagctctgttgcttgacaacatgaagaaagctctcaagttgctgaagactgaattgtaaagaaaaaaatctccaagcccttctgtctgtcaggccttgagacttgaaaccagaagaagtgtgagaagactngctagt

SEQ ID NO: 1274 - DNA, 712 bp, Homo sapiens
  misc_feature 37: n = A,T,C or G
gtatacgactcactatagggcgaattgggccctctanatgcatgctcgagtctgtggcagagtaggctttaaatctgcaggtgatcccacaaacaccatctaagcaaatgactgggctctcctctccctccacaggatgctttaccagagttactgatgaagttcctcaaggacagttcttagccttccttcctccatgagcagattctggctttgggggacatgcaaaagatcaataaagcagaaagcaaaaaataaattagaggcctgaggaactacaaaactagataatcagcctctaagtaaatgggagttggccacactttgagattaacagagtaatgtatttgaaggaatgagtatagatctgcactgtctaatatggtagccactagtcacatttggctacaaagacttgaaatatggtgatggtttgaattgagatgtgtttaatacacactgaatttcaaaggcctaatatgaaaaaaagtaaaataactcattaataatttttatattgatcctatgttgaaatgatagtgtttttgagctattgggttaaataaaatatatttaaatcaataccatgggtttctttttacttttaaaaaaatgtggttactagaaacatttaaattacagatgtggctctcattatagtatttacagtggacagtgcatctctagatgcctataccctaatctgtgttag

SEQ ID NO: 1275 - DNA, 476 bp, Homo sapiens
  misc_feature 327: n = A,T,C or G
ctttttttttttttttgtcaggacggtttatgttgtatttggctttcttggggtggacccctaaatagcaaaggcatacagagagactgaaaactcgttagagtgtctcatttgtaaacagaagtcattaacttcacattgtaattcagcacttcctatatttcactgaatgaaaggtaagtgtatatttttatactttttggaaaacatggctatagtgctttatataagcaaattaaatatttccattaagagagctttttaatcttgaaaagatgaattttgaccttgatttgatgaatagaaaaaggcattattgctctgcanaacactaataacttatccttcaaactttatacatactttcatacattatttaagtatgcttaaaaaacagctttaagattaaggcaattagtgggttaacagtttcatcagcttcaggctagttttgataagttttggtcgacgcggcc

SEQ ID NO: 1276 - DNA, 634 bp, Homo sapiens
  misc_feature 32, 69, 596: n = A,T,C or G
cttttttttttttttttttttgagatcagaantaaattctttaatacaaaatgcttttttttttttaanatatatctgtatttctttgtcgttgtttaaaaataaatatgtactacggaatatctcgaaaaactgcactagagacaaagacgtgatgttaatatcttttccccacaattattacggataaacagtagcaccaataaataaatgataacaaatattaaaattaaaaaaggagagagatttagtatgtagaattctctattttttcttgttttgtttttacatataaaaaacagaatagcaatgtctattttatcagaatcacatatatacataaacatatatatatatatatacacacaaatacaagttgccaaatatatatatagtatgtagatgtatattgaaaccttatttcaaaggaatgtgtgctggggagccaggggatcggggagggcagagctgagtgttagcaaaattaaatatctgttcaagataagctagtgactgtcaccgatcagggagagagagattggaaacatgaattttatatacaaaaaccggttcaaataagagagcaagagagagcnaaagatacatctcataaataggttgaaattaaatatta

SEQ ID NO: 1277 - DNA, 344 bp, Homo sapiens
  misc_feature 9, 35, 270: n = A,T,C or G
acagaggtnggggtgaccaactcatctggactcanacatatgaagaagctctatataaatccaagacaagcaacaaacccttgatgattattcatcacttggatgagtgcccacacagtcaagctttaaagaaagtgtttgctgaaaataaagaaatccagaaattggcagagcagtttgtcctcctcaatctggtttatgaaacaactgacaaacacctttctcctgatggccagtatgtccccaggattatgtttgttgacccatctntgacagttagagccgatatcactggaagatattcaaaccgtctctatgcttacgaacctgcagatacagctctg

SEQ ID NO: 1278 - DNA, 511 bp, Homo sapiens
  misc_feature 12, 249: n = A,T,C or G
tgggccctctanatgcatgctcgagcggccgcccttttttttttttttttttgcagttatttttcaaactttattttaaaaatatgagcatctattttaaaagttttgataattattgccattattttcttgtgattggtacaatttaaaaataagtctatgttttcacattgattttaaaaaatatagcatgtttgaattacaaatgattaagcaaactctattacttcatagctgaccatcttccanaaaattcccacttaattgaatacttagaaaaaaatggccagtggccgattgaaaggtatattaaaattaagggcagttttaattctgaagacaaatatcttcatggaaatctatttgtaagcttctgagattgctgctgaaagtctacagtctgtgaatataccaattcccctttacaactgatgcagatcattatgaaatactggaaggcataccctacaatttaggaattggtgtggctgccactgctatgctctcaatt

SEQ ID NO: 1279 - DNA, 602 bp, Homo sapiens
  misc_feature 32, 565: n = A,T,C or G
ctttttttttttttttacactcagattgtttntttaaaaatgcccaaaacacaaaaatagacttttaaggtaataatatatattactaaatatattatagtctacttataataattatatcgtcgttttcaatattacaaaaaaaggaagaaaaatacaagggaagcagacgacccaatatatataaatactataaaatcatattagaataaataaagtcgtcataaataaagggcccattgatttatgggtggggtttggcaacggctttggctacttgcttttggagggtaatttgagcaccaggattccccctcaggagaggttccagttaccaggagacactggaacctcaggtctataaaaactggaggggcagtgaaggcctattattcacagcacataagattctaggagacagatttgggcagggaagaggtgggggagagggttcattgcctcccttaaatatgctacaatttttttttcccccaagaacctcggaagacactccatcccccaccatcatgaatactgagcttgcacacttggggacctgccccancgtgaggtcaggggagtgggttaatgcattctggaaa

SEQ ID NO: 1280 - DNA, 54 bp, Homo sapiens
tgggccctctagatgcatgctcgagcggccgcccttttttttttttttttattt

SEQ ID NO: 1281 - DNA, 548 bp, Homo sapiens; identical to SEQ ID NO: 855

SEQ ID NO: 1282 - DNA, 695 bp, Homo sapiens
  misc_feature 65, 68, 90, 95, 128, 197, 284, 336, 411, 463, 478, 481, 509,536, 543, 605, 611, 612, 662, 686, 687: n = A,T,C or G
tgggccctctagatgcatgctcgagcggccgcccttttttttttttttttttttttttttttttnggntattaaataatttgtttattgnacggnatttacaaagaaaacagacaatgccctcagtanaaagaataaaaatgtatttagggctttatttttaactgacagcaaatagaaatcctttagtgagatcgnggcaatttgacagtattataattaagctcaataaaggtacatggggtacctggaagatcaagatctacagctgcctatttccacatntttcaatccatctggctccttaaataggggaaaaagcccttatttggtgganaagcatttccaaaatgaagttacaggttctattaaaacttactgtcacatcaactgttaaaatagggccttttgngttttgttatttcaccttaatatcaccagaattcctgtaattccacaattgngattttactatgtanaanataattcagttctagtctattgctttanatgtaaaaacagctgaaaacccaaagnggattanaattgctgaaggatttccctgccgttgtttgatacaatctattctcttgattcttgataggngcatannaagcctaacttaaaattctttctacaggaacatgtctgatttcaggagtncccaatgaaggatccgagctcggnnccaagctt

SEQ ID NO: 1283 - DNA, 223 bp, Homo sapiens
  misc_feature 53: n = A,T,C or G
atgcatgctcgagataaaaccatcaagctatggaataccctgggtgtgtgcanatacactgtccaggatgagagccactcagagtgggtgtcttgtgtccgcttctcgcccaacagcagcaaccctatcatcgtctcctgtggctgggacaagctggtcaaggtatggaacctggctaactgcaagctgaagaccaaccacattggccacacaggctatctga

SEQ ID NO: 1284 - DNA, 644 bp, Homo sapiens
  misc_feature 10, 97, 193, 195, 201, 208, 257, 283, 293, 355, 387, 395,408, 412, 428, 517, 527, 540, 543, 562, 596, 601, 608, 617: n = A,T,C or G
tacgactaantatagggcgaattgggccctctagcatgcatgctcgagcggccgccctttttttttttttttttttttttttttttttttattttanatatttttatttctccaaatttgttatttatcaggagtgactgaaataaaaaatacaattgagtcccatcatcatcatcatggaaatggctttaananaaaacntggtcanatgaatattattgcttcccattttcaaccagtaaatagttgccactganaaactgacagccaggagtctgtcaanaatgctcaanatatgttatataatacaacatgcctgttcacagggggaaaaatcctaggaaataacttatgngtacttcttgatttcatcatacaagacaagcncaaaagcnccacccatgcctntganaacattggaccatgcncccttgaaaaaagctttgcctccttcatcacgagcaatcttccgccagcagtcaagcgtgcctgtgtacatgatgtcagttcctttgcnccctgactgnatcatcatgcggnggngaacggggtcaaatggatnggaagtcaacccggcaacagcagtgacagtctgngcgancatccanctgatgacnatgtgagtgttcttgggatccgagctc

SEQ ID NO: 1285 - DNA, 221 bp, Homo sapiens; identical to SEQ ID NO: 618

SEQ ID NO: 1286 - DNA, 591 bp, Homo sapiens
  misc_feature 2, 31: n = A,T,C or G
cnactcactatagggcgaattgggccctctncatgcatgctcgagaagtaattatcagttggtttggatttttggaccaccgttcagtcattttgggttgccgtgctcccaaaacattttaaatgaaagtattggcattcaaaaagacagcagacaaaatgaaagaaaatgagagcagaaagtaagcatttccagcctatctaatttctttagttttctatttgcctccagtgcagtccatttcctaatgtataccagcctactgtactatttaaaatgctcaatttcagcaccgatggccatgtaaataagatgatttaatgttgattttaatcctgtatataaaataaaaagtcacaatgagtttgggcatatttaatgatgattatggagccttagaggtctttaatcattggttcggctgcttttatgtagtttaggctggaaatggtttcacttgctctttgactgtcagcaagactgaagatggcttttcctggacagctagaaaacacaaaatcttgtaggtcattgcacctatctcagccataggtgcagtttgcttctacatgatgctaaaggctgcgaatg

SEQ ID NO: 1287 - DNA, 707 bp, Homo sapiens
tatacgactcatatagggcgaattgggccctctacatgcatgctcgaggtggtggcagggccgccccctgcagtccggagacgaacgcacggaccgggcctccggaggcaggttcggctggaaggaaccgctctcgcttcgtcctacacttgcgcaaatgtctccgagcttactcacatagcatattggtatatcaaaatgaaatgcaaggaaccaaaaataacataattgaaggcagtaaaagtgaaattaaataggaagatcatcagtcaaggaagacccactggagaggacagaaaatgaagcagtgttttatcatgtgtatttcagcaggtcttcttgaaatttaactaaaaatatgactgctctctcttcagagaactgctcttttcagtaccagttacgtcaaacaaaccagcccctagatgttaactatctgctattcttgatcatacttgggaaaatattattaaatatccttacactaggaatgagaagaaaaaacacctgtcaaaattttatggaatatttttgcatttcactagcattcgttgatcttttacttttggtaaacatttccattatattgtatttcagggatttttgtacttttaagcattaggttcactaaataccacatctgcctatttactcaattatttcctttacttatggctttttgcattatccagttttcctgacagctt

SEQ ID NO: 1288 - DNA, 562 bp, Homo sapiens
gggccctctagatgcatgctcgagcggccgcccttttttttttttttttgaaaaagtcatggaggccatggggttggcttgaaaccagctttggggggttcgattccttccttttttgtctagattttatgtatacgggttcttcgaatgtgtggtagggtggggggcatccatatagtcactccaggtttatggagggttcttctactattaggacttttcgcttcgaagcgaaggcttctcaaatcatgaaaattattaatattactgctgttagagaaatgaatgagcctacagatgataggatgtttcatgtggtgtatgcatcggggtagtccgagtaacgtcggggcattccggataggccgagaaagtgttgtgggaagaaagttagatttacgccgatgaatatgatagtgaaatggattttggcgtaggtttggtctagggtgtagcctgagaataggggaaatcagtgaatgaagcctcctatgatggcaaatacagctcctattgataggacatagtggaagtgagctacaacgtagtacgtgtcgtgtag

SEQ ID NO: 1289 - DNA, 665 bp, Homo sapiens
  misc_feature 2: n = A,T,C or G
cnactcactatagggcgaattgggccctctacatgcatgctcgagtctttaatataaccccaaatgaaagaaccaaggggaggggtgggatggcacttttttttgttggtcttgttttgttttgttttttggttggttggttcgttattttttaagattagccattctctgctgctatttccctacataatgtcaatttttaaccataattttgacatgattgagatgtacttgaggcttttttgttttaattgagaaaagactttgcaattttttttttaggatgagcctctcctagacttgacctagaatattacatattcctccagtaagtaatactgaagagcaaaagagaggcaggattggggtcacagccgcttcttcagcatggaccaagtgggccttggggattgcagcgttctcgaagtggctgtaggactcgaatttacagaaagccacagaggtgcaacttgaggctctgctagcaagccaccagtgaggctattgggtaaccacctttctatacaggagattggaatctactttgtcatttatccaccacagtgacaaaggaaaagtggtgccgttatgcaatccatttaactcataaacatattactctgagtaactggccagccattcatcggatccgagctcggtaccaa

SEQ ID NO: 1290 - DNA, 548 bp, Homo sapiens; identical to SEQ ID NO: 855

SEQ ID NO: 1291 - DNA, 596 bp, Homo sapiens
tatacgactaactatagggcgaattgggccctctagatgcatgctcgagcgcatgggccccgccatgggcccggccctgggcgctggcattgagcgcatgggcctggccatgggtggcggtggcggtgccagctttgaccgtgccatcgagatggagcgtggcaacttcggaggaagcttcgcaggttcctttggtggagctggaggccatgctcctggggtggccaggaaggcctgccagatatttgtgagaaatctgccattcgatttcacatggaagatgctaaaggacaaattcaacgagtgcggccacgtgctgtacgccgacatcaagatggagaatgggaagtccaaggggtgtggtgtggttaagttcgagtcgccagaggtggccgagagagcctgccggatgatgaatggcatgaagctgagtggccgagagattgacgttcgaattgatagaaacgcttaagcagttgccttttttaaacatcgatacgagacctctgaatttgtattttttcttgttaaccattttaatttgttggctggatgtataaagatgtttaaaaaattcagttgctttttggggtaat

SEQ ID NO: 1292 - DNA, 548 bp, Homo sapiens; identical to SEQ ID NO: 855

SEQ ID NO: 1293 - DNA, 535 bp, Homo sapiens
  misc_feature 55, 272, 460, 534: n = A,T,C or G
tgcatgctcgagcggccgcgtcgacctctctaacctggcactgcgtcgctggctnggagacaggtgacggtccctgcgggccttgtcctgattggctgggcacgcgtttaatataagtggaggcgtcgcgctggcgggcattcctgaagctgacagcattcgggccgagatgtctcgctccgtggccttagctgtgctcgcgctactctctctttctggcctggaggctatccagcgtactccaaagattcaggtttactcacgtcatccancagagaatggaaagtcaaatttcctgaattgctatgtgtctgggtttcatccatccgacattgaagttgacttactgaagaatggagagagaattgaaaaagtggagcattcagacttgtctttcagcaaggactggtctttctatctcttgtactacactgaattcacccccactgaaaaagatgantatgcctgccgtgtgaaccatgtgactttgtcacagcccaagatagttaagtgggatcgagacatgtaagcagna

SEQ ID NO: 1294 - DNA, 223 bp, Homo sapiens; identical to SEQ ID NO: 734

SEQ ID NO: 1295 - DNA, 599 bp, Homo sapiens
  misc_feature 38, 47, 151, 192, 194, 245, 301, 349, 385, 397, 436, 452,495, 562, 586: n = A,T,C or G
ctttttttttttttttttttttttttttttttttaagncaacgtatntatttttattatgaaacattaaattttgacacattgcctcatttgcttttttaaaatctattatctgacttaaacctattcagcaaaaatgccaataaattatnttaatcatactttgggtctttttaaaactaggaacataatntnttttatgataaacaataatactaaatctgagttgtatgaactgttaacttnaaatttgttttaaatgtttagcttaaaacaaaaagaaaaccaatcacattaatacnctgttgcaaaagtttctccggaatgccctccacatcactgggtgtcancatccttcggcttcttcactgaggtatggaatgcanccatatgtaggngtcaaggcactcattctaagctgtcctatcctgcacatnttagcaatcacattanatggagggctgatgatatgcactaactcccaacccaggctatnttgcttttaaataaactaatttctttaaaagaaaatcatcaactaaggactcaaatgctgaatttanaaataataattccaattcaatacncattcaatcaaat

SEQ ID NO: 1296 - DNA, 548 bp, Homo sapiens; identical to SEQ ID NO: 855

SEQ ID NO: 1297 - DNA, 647 bp, Homo sapiens
  misc_feature 87: n = A,T,C or G
tacgactcactatagggcgaattgggccctctagatgcatgctcgaggtgaagttttaaaaaaaaagttgtggaaaggaaagttccnaagaggtggtttctgaggaagtcagagcgcccagggccagagcagtcagtaatgggtgaatgaggttgtttggaaagtcggtgtgacagacacatggatgccatctacttctaggttgctggtgggtattaaatatgcacaatattccatagctcactgaggattttaaaattataagcataggattttatattttggggtgaaagaattatctggcacattaggtattggagtttaaaaaaaaagccaaatttcacagtcttaataactttttttaaaaaaaactaaaaggcgcttcatgtccagtgtgtggcccttctgaaacttatggtcatctctcccactgaaaccaaggtcttttcaaatgtggctaaatggggatgaggagacacgggtaggactttcttggtgtgtgtgcattctttaaagagccaagttgcttcggggaaacagccaggaaaatggtcaagattatttttagaggttattttattggggattttaagaactaataacatcttgagttatttttaattcagggggatgtggaaaggtttgca

SEQ ID NO: 1298 - DNA, 167 bp, Homo sapiens
gtcgacgaccaagaagatgtgctgctgttcctacaacattggccgggcgtggaacaagccctgtgaacagtgtcccatcccaagtacagatgagtttgctacactctgtggaagtcaaaggccaggctttgtcatcgacatttataccggtttacccgttgatattg

SEQ ID NO: 1299 - DNA, 645 bp, Homo sapiens
tgggccctctagatgcatgctcgagtctttaatataaccccaaatgaaagaaccaaggggaggggtgggatggcacttttttttgttggtcttgttttgttttgttttttggttggttggttcgttattttttaagattagccattctctgctgctatttccctacataatgtcaatttttaaccataattttgacatgattgagatgtacttgaggcttttttgttttaattgagaaaagactttgcaattttttttttaggatgagcctctcctagacttgacctagaatattacatattcctccagtaagtaatactgaagagcaaaagagaggcaggattggggtcacagccgcttcttcagcatggaccaagtgggccttggggattgcagcgttctcgaagtggctgtaggactcgaatttacagaaagccacagaggtgcaacttgaggctctgctagcaagccaccagtgaggctattgggtaaccacctttctatacaggagattggaatctactttgtcatttatccaccacagtgacaaaggaaaagtggtgccgttatgcaatccatttaactcataaacatattactctgagtaactggccagccattcatcggatccgagctcggtaccaa

SEQ ID NO: 1300 - DNA, 633 bp, Homo sapiens
  misc_feature 2: n = A,T,C or G
cnactcatatagggcgaattgggccctctacatgcatgctcgagcggccgcccttttttttttttttttactttgacaacaaattatattttaaatgtttcatatttacttttatatttccatacaatcagaaacagtaaaaaaaatttggagagcacataaaaacatcttaaagttaaaaatataaagccttgtatttaaaaatgcagtcatttaaataatattataagaatctatttgtacataataaacaagtttcaaccagcaagaaattactaatattgactgtggagttttggctgttttaatagttctaactcattattccgtaattcaacacagcactaccaacacagctggcaatgacaagactgggagtatcaaactaggattgttagttcaattaaaatttcagataaacaataatgtacttatactaaaaaattatttgttgtttatctgaaatgaaaatttaactgggtacccaattgtttgtttgtttaatctaaaaaccctgattgaaatttatctaataaaacatcatttaatatctaaaataaaataaatttactataacatctttataactattcaatcaatgattcatcttctatttttccaaattcttgcaca

SEQ ID NO: 1301 - DNA, 430 bp, Homo sapiens
  misc_feature 15, 60, 82, 103, 118, 134, 212, 253, 271, 296, 338, 358,359, 384, 390, 400, 410, 419: n = A,T,C or G
gccaactcacacaangcaggtgagtgaggacatccagagttgccatggagaaaaatccantgtcagcattcttgctccttgnggccctctcctacactctggncagagataccacagncaaacctggagccaanaaggacacaaaggactctcgacccaaactgccccagaccctctccagaggttggagtgaccaactcatctggactcanacatatgaagaagctctatataaatccaagacaagcaacanacccttgatgattattcntcacttggatgagtgcccacacagncaagctttaaagaaagtgtttgctgaaaataaagaaatccanaaattggcagagcagtttgnnctcctcaatctggtttatgaaacanctgacnaacacctttntcctgatggncagtatgtncccaggattat

SEQ ID NO: 1302 - DNA, 711 bp, Homo sapiens
  misc_feature 424, 706: n = A,T,C or G
gtatacgactaatatagggcgaattgggccctctagatgcatgctcgagtgagttctcagaagaaactggggcttctggtacaaggaaagggaaacaaccacataaacgcaagaaaaaatccaggaaaaagtctctcaaaaaacctgctttattcttagaggcagaaagtaacacttcacattcagatgattcagcatccagcagttctgaggaaagtgaggaaagagacactaagaaaaccaaaaggaaaaagagagagaaaaaagcccatacctctgtagccaacaatgaaatacaggagaggacaaacaaacgcacaaattggaaagtagctacagatgaaaggtctgctgagagctcagaggatgactaaatgggaaacacttttgttttccacatgactgtggatatttacagttcttnctccttgtggttttgccagtgactcttgttcagcacggggcctgaggtcagagctgtcttgtgccatctgtatgttctgacagacgtcttgtcttctattttggcgttaagcttgatccccttttcttgttaaaagggaatctggtattttgttatgaaggtttcttgaagagatttttttttttgcaattaattacgtttagtgtagagtgcatatacagcaaattaaaggacccagaaagctggatccgagctcggtaccaagcttggcgtaatcatggncatag

SEQ ID NO: 1303 - DNA, 602 bp, Homo sapiens
  misc_feature 80: n = A,T,C or G
cactatagggcgaattgggccctctagatgcatgctcgagagagctacctttttccttttatgtataaggacacagctanaaaatgccatgtatgatccagaggcctaatttgttgatcccttaatcttggacttcccaccattgagaacagcgagaaataaatttctgttgtttataagctgccaagttcatagtatttcattacagcagcctgcacagaccaaggcagtatttttttttaatgtcttctaagggaacccccccaaaagtaaacaaaaatctacaaaagttatttgtatgatcaaaatcaaaacattcttattcacgaaatagaagctacagtaaattttcaaaaaataagagttaaaaaactccccccatatgatatattttacagtttcacaagggtaccaggtcgtgaaggaattttattaaatctattaaatcatagatagcttttaataagttcaattttactttaagagctaataagttacttgatattaacctttttacttataaggtaagtgggagatatgacatcataatcttagacatttaaaaaatcctgagaaagattatttcaatcttttacagtttg

SEQ ID NO: 1304 - DNA, 669 bp, Homo sapiens
  misc_feature 650, 655: n = A,T,C or G
tgggccctctagatgcatgctcgagtctttaatataaccccaaatgaaagaaccaaggggaggggtgggatggcacttttttttgttggtcttgttttgttttgttttttggttggttggttcgttattttttaagattagccattctctgctgctatttccctacataatgtcaatttttaaccataattttgacatgattgagatgtacttgaggcttttttgttttaattgagaaaagactttgcaattttttttttaggatgagcctctcctagacttgacctagaatattacatattcctccagtaagtaatactgaagagcaaaagagaggcaggattggggtcacagccgcttcttcagcatggaccaagtgggccttggggattgcagcgttctcgaagtggctgtaggactcgaatttacagaaagccacagaggtgcaacttgaggctctgctagcaagccaccagtgaggctattgggtaaccacctttctatacaggagattggaatctactttgtcatttatccaccacagtgacaaaggaaaagtggtgccgttatgcaatccatttaactcataaacatattactctgagtaactggccagccattcatcggatccgagctcggtaccaagcttngcgtnatcatggtcatagc

SEQ ID NO: 1305 - DNA, 571 bp, Homo sapiens
  misc_feature 12: n = A,T,C or G
tgggccctctanatgcatgctcgagaagtaattatcagttggtttggatttttggaccaccgttcagtcattttgggttgccgtgctcccaaaacattttaaatgaaagtattggcattcaaaaagacagcagacaaaatgaaagaaaatgagagcagaaagtaagcatttccagcctatctaatttctttagttttctatttgcctccagtgcagtccatttcctaatgtataccagcctactgtactatttaaaatgctcaatttcagcaccgatggccatgtaaataagatgatttaatgttgattttaatcctgtatataaaataaaaagtcacaatgagtttgggcatatttaatgatgattatggagccttagaggtctttaatcattggttcggctgcttttatgtagtttaggctggaaatggtttcacttgctctttgactgtcagcaagactgaagatggcttttcctggacagctagaaaacacaaaatcttgtaggtcattgcacctatctcagccataggtgcagtttgcttctacatgatgctaaaggctgcgaatg

SEQ ID NO: 1306 - DNA, 566 bp, Homo sapiens
ctttttttttttttttttggaatgtaaatcttttattaaaacagttgtctttccacagtagtaaagctttggcacatacagtataaaaaataatcacccaccataattataccaaattcctcttatcaactgcatactaagtgttttcaatacaattttttccgtataaaaatactgggaaaaattgataaataacaggtaagagaaagatatttctaggcaattactaggatcatttggaaaaagtgagtactgtggatatttaaaatatcacagtaacaagatcatgcttgttcctacagtattgcgggccagacacttaagtgaaagcagaagtgtttgggtgactttcctacttaaaattttggtcatatcatttcaaaacatttgcatcttggttggctgcatatgctttcctattgatcccaaaccaaatcttagaatcacttcatttaaaatactgagcggtattgaatacttcgaagcagaacaggcaatgtgcagccctcatttatgagaaaaccctcaggaaactcccagggtgatgcttggagaagctgtgagtt

SEQ ID NO: 1307 - DNA, 103 bp, Homo sapiens
atagggcgaatgggccctctagatgcatgctcgagcggccgcccttttttttttttttttttttttttttttttttttttttttttttttttttttttttttt

SEQ ID NO: 1308 - DNA, 81 bp, Homo sapiens
tgctcgagcggccgcccttttttttttttttttttttttttttttttttttttttttttttttttttttttttttaaaaaa

SEQ ID NO: 1309 - DNA, 670 bp, Homo sapiens
  misc_feature 11, 12, 194, 459, 474, 544, 577: n = A,T,C or G
tgggccctctnnatgcatgctcgagcggccgcccttttttttttttttttttttttttttttaggagaactgaatcaaacagattttattcaactttttagatgaggaaaacaaatgatacaaaataagtcataagaaatgctttcttataccactatctcaaaccactttcaatattttacaaaatgctcacncagcaaatatgaaaagcttcaacactttccctttgtaacttgctgcaataaatgcaactttaacaaacatacaaatttcttctgtatcttaaaagttgaattactaatttttatgttactcatatttttattcatatacttttaatgacatcattgccaatacatacattattttctttaactttatttttacaataagccaacatctgtcatgcagccatcaaaaatcttacagtaaattacacaggtttgtagtccaatttanactccagcttcttanaatcagccacttttctgactgctttcatgaagtcttcctgtactacaaaatcatgatcagcacgaattgngaacatacctgcttcagtacaaacatttctcanatctgctccattaaagccatccgaaagcttcacaattgcttcataatctatttcaccatgctttgtaatgggacctgcatggattttcagtat

SEQ ID NO: 1310 - DNA, 637 bp, Homo sapiens
  misc_feature 2: n = A,T,C or G
cnactcatatagggcgaattgggccctctagatgcatgctcgagcggccgccctttttttttttttttactttgacaacaaattatattttaaatgtttcatatttacttttatatttccatacaatcagaaacagtaaaaaaaatttggagagcacataaaaacatcttaaagttaaaaatataaagccttgtatttaaaaatgcagtcatttaaataatattataagaatctatttgtacataataaacaagtttcaaccagcaagaaattactaatattgactgtggagttttggctgttttaatagttctaactcattattccgtaattcaacacagcactaccaacacagctggcaatgacaagactgggagtatcaaactaggattgttagttcaattaaaatttcagataaacaataatgtacttatactaaaaaattatttgttgtttatctgaaatgaaaatttaactgggtacccaattgtttgtttgtttaatctaaaaaccctgattgaaatttatctaataaaacatcatttaatatctaaaataaaataaatttactataacatctttataactattcaatcaatgattcatcttctatttttccaaattcttgcacaaatat

SEQ ID NO: 1311 - DNA, 525 bp, Homo sapiens
  misc_feature 2: n = A,T,C or G
cnactcactatagggcgaattgggccctctagatgcatgctcgagcggccgcgtcgacttttttttttttttatttttaaaactttattttaaaaatatgagcatctattttaaaagttttgataattattgccattattttcttgtgattggtacaatttaaaaataagtctatgttttcacattgattttaaaaaatatagcatgtttgaattacaaatgattaagcaaactctattacttcatagctgaccatcttccagaaaattcccacttaattgaatacttagaaaaaaatggccagtggccgattgaaaggtatattaaaattaagggcagttttaattctgaagacaaatatcttcatggaaatctatttgtaagcttctgagattgctgctgaaagtctacagtctgtgaatataccaattcccctttacaactgatgcagatcattatgaaatactggaaggcataccctacaatttaggaattggtgtggctgccactgctatgctctcaatt

SEQ ID NO: 1312 - DNA, 591 bp, Homo sapiens
  misc_feature 32: n = A,T,C or G
ctttttttttttttttactttgacaacaaatnatattttaaatgtttcatatttacttttatatttccatacaatcagaaacagtaaaaaaaatttggagagcacataaaaacatcttaaagttaaaaatataaagccttgtatttaaaaatgcagtcatttaaataatattataagaatctatttgtacataataaacaagtttcaaccagcaagaaattactaatattgactgtggagttttggctgttttaatagttctaactcattattccgtaattcaacacagcactaccaacacagctggcaatgacaagactgggagtatcaaactaggattgttagttcaattaaaatttcagataaacaataatgtacttatactaaaaaattatttgttgtttatctgaaatgaaaatttaactgggtacccaattgtttgtttgtttaatctaaaaaccctgattgaaatttatctaataaaacatcatttaatatctaaaataaaataaatttactataacatctttataactattcaatcaatgattcatcttctatttttccaaattcttgcacaaatatttgatg

SEQ ID NO: 1313 - DNA, 119 bp, Homo sapiens
  misc_feature 110, 111: n = A,T,C or G
tatagggcgaattgggccctctagatgcatgctcgagcggccgcccttttttttttttttttttttttttttttttttttttttttttttttttttttttttttttggcnntaaaaggg

SEQ ID NO: 1314 - DNA, 676 bp, Homo sapiens
tgggccctctagatgcatgctcgagtcggccagctggatctcccacaaggtttccttgttaaacgggtgcttaagtaacctggccggcagcacgacttatgatgaagcacgaagaagccaggttctgtgtcgatcactctctcagtcccctcaactgctcatcttaaactatttggttcctgacacgtttccaaaaggggaaaggggaaaaggggaaggggggaaggggaacataaaaagtatttgttacatttaaaaagggggggaaggggaaagagctgtatctatgttcacctcattcaacttccttgagttatggcactatgatgttgcttaattaggtaagacatggatatttgcaccgagtgcaaatactgttcataacaaggtcatagctagaaagacagatgggctcaagtgtggacaaataatgtcatcaaggtaatagatcaaaaatattaaagccctataaaagatctgagcagtcaactccaaaacatccacatgacaaagtccttaaaatacaaatctcattactcttactcatgcaactgctaaaaaatagtgtgcagatatgtatttatatttgccttaaccttcaaaatctagggacataaatcttgtctttgttaaaaaaaaataaaaaataaaaatagacaggaatttgctacacttt

SEQ ID NO: 1315 - DNA, 528 bp, Homo sapiens
  misc_feature 72, 86, 96, 135, 139, 147, 190, 226, 287, 339, 345, 362,368, 380, 386, 390, 392, 397, 443, 493, 495, 503, 509, 514,517, 522: n = A,T,C or G
tgcatgctcgagcggccgccctttttttttttttttttttttttttttttttttttctttttttacttattnaaaaaggccttggnggcaggaatntagtgtaaaaatcattggaaaaactaaaaggcatcgatncatntccgaatntacattttgtacataaattacatttcctttagtctttctgagngaggtcctgattcagtactgaggtctagtaattaanaggtcccgggagctgcacgttcaggccggcatagtccaccatgtacattggccattgcacnagtgaaatctggttggccgatgccactgaatccgggttagaggacgaggaanaggaanacgaggaggaagagganacggantttccttccganacccgntttntnttgcncttgggaatgctgctgtctttggctggcaccttggcatcattgcanatttctgcaaagggttggagctggttaatgatgaccatgcggacatgctntngggccttnaggatnttttncanccggnggatgt

SEQ ID NO: 1316 - DNA, 422 bp, Homo sapiens
  misc_feature 9, 409: n = A,T,C or G
acgactaantatagggcgaatgggccctctacatgcatgctcgaggaggatcggccccatgatgggaagcaccggggtttcttagcgcctggaagctggctgggagcgcttgggctccttcccaggacccgacgttcctaggactgagttgagtaacagcacctggagactggaactttggagggctccttagagttgtgagttcacagcactgaagttccttggctcttggaagctggagtgtttaaattccccaggctgggcgctgaggcttctctgctctgccccgtgtgccagatgtccgaaagctgggagttcggagcgcccggattccttgggagctgggaatacgagagtttctctgggtgggacgtggggcccttggctccagggggttgagtacccccanatggcggaggtct

SEQ ID NO: 1317 - DNA, 583 bp, Homo sapiens
atagggcgaatgggccctctagatgcatgctcgagcggccgcgtcgactttttttttttttttttgagttttaatgttggttatgtcaatttattagtaattttggtcttcccattagtgtcctgtataaaaatgatgagtttctccgtagtacgtacaacagcttttaaagagaacgtaggcagaataattcagacagaaaccataaataaccagaaggcaaagtgaagcaaaattgtctcatgtgatgtttatcccaatttatatcgatattcttctatcaatttttagactgttaaagtaaaatcttaatctaagtgtcttatgaatcattataaaagattccaacctttaaaaattatgaaaggtttaaagacctcattaatagagttagaaatgtttgctattatcctactggtcaactttggtctgtattttctgcacctcttcaggccaagaataacaatcaggtagaatctggtcataatcagtactatacatctgggagcggacaaatgcttctttgttttgcggttcaggataaactgtggctgtcttttcttggtatgcatctttcacaatc

SEQ ID NO: 1318 - DNA, 549 bp, Homo sapiens
ctttttttttttttttttcagtttttcagattttactgtggaagcatatttaatgcacacatttgaatgttacacataaataattttaacgatggagtccaagttctggattttacattagatctgcatatataagacacttgtggtcaaatttcaagattggtaaagccagtttcaagctgcttatattttgagtacaggtttcactattacaaatatatgatgttaaactaacaaactcatgaccttcaaagatgtcttcgtcccacgcacacacatttgtaatttgtgtccatttgctatttcccttcttctataatcttcaaattatatagttatgcattgagttccctatgcatctcacccatctcctttatctcagccttctcatactttgccattctcttctttctggaaataaccagcacaacaattccagcaacaactgctatcaccacaaccacaataacagcaataacaccagcttttagaccctgcattgagaattcaggtgctttttcatcaacataataaattaaagtttgacca

SEQ ID NO: 1319 - DNA, 342 bp, Homo sapiens
  misc_feature 83, 84: n = A,T,C or G
cgactcatatagggcgaattgggccctctagatgcatgctcgagcggccgccctttttttttttttttatttttatagctttnntaatttattataacattatttcaaaatgaaaggttaaaaaacatacattaaagtataagtgttcttaccaaattaaaaaaattgtcttcccttttataaaatgatcaccatgggtttattttaagaatcaattcatgactggctgtactaaaaatatgatttgatctattactttgtgaatatatacaataatgtgattcagcccaatactttgttcattcattcagcaattacttattaagggcacactgcatgcaa

SEQ ID NO: 1320 - DNA, 390 bp, Homo sapiens
  misc_feature 2, 6, 31: n = A,T,C or G
cnactnctatagggcgaattgggccctctanatgcatgctcgagccctgggggtgctcctggaagccccaagagcatccaggattgcctcccagctgcctggccagcccaccctcctgcaacctctcacccgaacaccagtgatcaggactggagcccccgtgccttggtctcccccctgggcacacgtgctcactcaggcccagcaatgacctctgctcatttttgcatttttgacttatgggccgaggctgttctgagcctgggaagatgtacctatgtcaagagaagggatgaggccaaggctgccttcaattagaagcagccgcccacagagacaggcactgtgtgcctggcagcaggacttcctacccagaggaggttcgagcta

SEQ ID NO: 1321 - DNA, 643 bp, Homo sapiens
  misc_feature 76, 413: n = A,T,C or G
atagggcgaattgggccctctagatgcatgctcgagcggccgcccttttttttttttttttttaaaagctccaagncattagctttatttttactgaattcagcatgggatgacaaaaatgcattatatcactaccatccattattacatgtagacatttatccttgtattctttatatgtccattttctacgttaaatctgttaaccaatactaatttaaattacatgatttcctactaaaaatatgcagttcatataagcaagggcaaataaatcctccttaaaacattttattcctttataattgagaacttaacagtcttaatggctagttcttaaaaaatgtttataggattaagtttatttaagagagcagacaaacaaaacatattgtaaaactagtattttccanaagcaatttccattctcttcctttcttcctgcaaactggtgttttatctttacaagttctctgtcattccataagaaagctgaacagtggttaaaacatccagtttgcttgaattcctgagtgattcagattccagtgagattgagggtcattcataacagttacaaggctggtgtggtaaagggagaacaaaaataaactgggtttctgcaggtaagtgagaagacaaa

SEQ ID NO: 1322 - DNA, 425 bp, Homo sapiens
gactcactatagggcgaattgggccctctacatgcatgctcgagctatgcaacctctgttcttgtatttcttatgatctctgatgggttcttctcgaaaatgccaagtggaagactttgtggcatgctccagatttaaatccagctgaggctccctttgttttcagttccatgtaacaatctggaaggaaacttcacggacaggaagactgctggagaagagaagcgtgttagcccatttgaggtctggggaatcatgtaaagggtacccagacctcacttttagttatttacatcaatgagttctttcagggaaccaaacccagaattcggtgcaaaagccaaacatcttggtgggatttgataaatgccttgggacctggagtgctgggcttgtgcacaggaagagcaccagccgctgagtca

SEQ ID NO: 1323 - DNA, 548 bp, Homo sapiens
  misc_feature 522, 523: n = A,T,C or G
gccaactcacacaaggcaggtgagtgaggaaatccagagttgccatggagaaaaatccagtgtcagcattcttgctccttgtggccctctcctacactctggccagagataccacagtcaaacctggagccaaaaaggacacaaaggactctcgacccaaactgccccagaccctctccagaggttggggtgaccaactcatctggactcagacatatgaagaagctctatataaatccaagacaagcaacaaacccttgatgattattcatcacttggatgagtgcccacacagtcaagctttaaagaaagtgtttgctgaaaataaagaaatccagaaattggcagagcagtttgtcctcctcaatctggtttatgaaacaactgacaaacacctttctcctgatggccagtatgtccccaggattatgtttgttgacccatctctgacagttagagccgatatcactggaagatattcaaaccgtctctatgcttacgaacctgcagatacagctctgnngcttgacaacatgaagaaagctctc

SEQ ID NO: 1324 - DNA, 553 bp, Homo sapiens
  misc_feature 114, 130, 157, 191, 250, 331, 376, 421: n = A,T,C or G
ttttttttttttttttttttttttttttttactttgacaacaaattatattttaaatgtttcatatttacttttatatttccatacaatcagaaacagtaaaaaaaatttgganagcacataaaaacatnttaaagttaaaaatataaagccttgtntttaaaaatgcagtcatttaaataatattataanaatctatttgtacataataaacaagtttcaaccagcaagaaattactaatattgactgnggagttttggctgttttaatagttctaactcattattccgtaattcaacacagcactaccaacacagctggcaatgacaanactgggagtatcaaactaggattgttagttcaattaaaatttcanataaacaataatgtacttatactaaaaaattatttgttgtttatntgaaatgaaaatttaactgggtacccaattgtttgtttgtttaatctaaaaaccctgattgaaatttatctaataaaacatcatttaatatctaaaataaaataaatttactataacatctttataactatt

SEQ ID NO: 1325 - DNA, 576 bp, Homo sapiens
  misc_feature 111, 122, 134, 148, 278, 280, 370, 379, 398, 402, 435, 436,437, 440, 495, 504, 542: n = A,T,C or G
ttttttttttttttttttttttttactggggaagcatatttaatgcacacatttgaatgttacacataaataattttaacgatggagtccaagttctggattttacattanatctgcatatntaagacacttgnggtcaaatttcaanattggtaaagccagtttcaagctgcttatattttgagtacaggtttcactattacaaatatatgatgttaaactaacaaactcatgaccttcaaagatgtcttcgtcccacgcccccccatttgtaattngngtccatttgctatttcccttcttctataatcttcaaattatatagttatgcattgagttccctatgcatctcacccatctcctttatctnagccttctnatactttgccattctcttntttntggaaataaccagcacaacaattccagcaacannntgntttcaccacaaccacaataacagcaataacaccagcttttaaaccctgcattganaattcaggngctttttcatcaacataataaattaaagtttgaccagnatccgagctcggtaccaagcttggcgtaatcatg

SEQ ID NO: 1326 - DNA, 334 bp, Homo sapiens
  misc_feature 33, 54, 158, 164, 229, 261, 315, 320: n = A,T,C or G
tttttttttttttttttttttttttttttttanagctaattggcttttatttgngatttatgaattaaagcagcaccactctacaagtacagtgatagctccccctgggcaatacaatacaagaacagtgggttttgtcaaattggaacaaggaaacngaaccncagaaataaatacattggttaacatcaaattaattcaggttacttttttgtaaaagttaaagtanaggggacttctgtattatgctaactcaagtanactggaatctcctgtgttctttttttttttaaattgggtttaattttttttaantgganctatcttcttcctt

SEQ ID NO: 1327 - DNA, 667 bp, Homo sapiens
aggtggtggcagggccgccccctgcagtccggagacgaacgcacggaccgggcctccggaggcaggttcggctggaaggaaccgctctcgcttcgtcctacacttgcgcaaatgtctccgagcttactcacatagcatattggtatatcaaaatgaaatgcaaggaaccaaaaataacataattgaaggcagtaaaagtgaaattaaataggaagatcatcagtcaaggaagacccactggagaggacagaaaatgaagcagtgttttatcatgtgtatttcagcaggtcttcttgaaatttaactaaaaatatgactgctctctcttcagagaactgctcttttcagtaccagttacgtcaaacaaaccagcccctagatgttaactatctgctattcttgatcatacttgggaaaatattattaaatatccttacactaggaatgagaagaaaaaacacctgtcaaaattttatggaatatttttgcatttcactagcattcgttgatcttttacttttggtaaacatttccattatattgtatttcagggattttgtacttttaagcattaggttcactaaataccacatctgcctatttactcaaattatttcctttacttatggctttttgcattatccagttttcctgacagcttgtatag

SEQ ID NO: 1328 - DNA, 646 bp, Homo sapiens; identical to SEQ ID NO: 420
  misc_feature 515: n = A,T,C or G

SEQ ID NO: 1329 - DNA, 564 bp, Homo sapiens
  misc_feature 41: n = A,T,C or G
agagagctacctttttccttttatgtataaggacacagctngaaaatgccatgtatgatccagaggcctaatttgttgatcccttaatcttggacttcccaccattgagaacagcgagaaataaatttctgttgtttataagctgccaagttcatagtatttcattacagcagcctgcacagaccaaggcagtatttttttttaatgtcttctaagggaacccccccaaaagtaaacaaaaatctacaaaagttatttgtatgatcaaaatcaaaacattcttattcacgaaatagaagctacagtaaattttcaaaaaataagagttaaaaaactccccccatatgatatattttacagtttcacaagggtaccaggtcgtgaaggaattttattaaatctattaaatcatagatagcttttaataagttcaattttactttaagagctaataagttacttgatattaacctttttacttataaggtaagtgggagatatgacatcataatcttagacatttaaaaaatcctgagaaagattatttcaatcttttacagtttg

SEQ ID NO: 1330 - DNA, 638 bp, Homo sapiens
  misc_feature 621: n = A,T,C or G
aggacaaaaacccacaccggacatagatcacaaaacttcctagaactctcctttaaatcggaagaaatttgtaaaatgtgatatgaaatacaactctacaaacatccaaaatacatttctggtcataattaatcgtatttgacattttcctctaagtttaatgcaactttaaataatttaggctttttcctaacatgatagatttttttcagtatcagaaatggacaagaggaaactccagtaaagagaaaagcaatgaatttaaaagggtgcagaatctgaaaacaaactaaccacaatgtacatttaattgtacttaattgtatatttcatttaaatagtccttctcaggggtttaataatttagaatcaatagttcccttcaaaacataataaaatatttacactttataaaatattaaccgattaacaatacagccgtgttgtttataagagtgtaactgaagtcctgcaaatcatgctgttgacacaagcctgtgaggttagcgaagtgatccttagcaaaatgtaaatgaagatcttcagacagtggtgtttataaaatagctcattaatgacttaggattgaatcgctccaaccattcgcatcatcagatatantaatagtgacgaatcag

SEQ ID NO: 1331 - DNA, 551 bp, Homo sapiens
  misc_feature 137, 292: n = A,T,C or G
tatacgactcactatagggcgaattgggccctctagatgcatgctcgagcggccgcccttttttttttttttttttagtgaagaagaaaatcctttattttttgatgagcaaaaataataaattgctgttcacactnggataagaccatatcaaaagtgacagtaaacatgtacactgttggtgttatatggggatggggttctcggtaattttgtttattatttatgtttattattatgttttatcattaattattcaataaatttttatttaaaaagtcaccctacttanaaatcttctgtgggggtgggagggacaaaagattacaaaccaaaactcaggagatggtaacactggaattgataaaatcacctgggattagttgtataactctgaaccaccaaacctctgctatcaagccttgctacagtcatggctgtccagaaagatttacagttatttttctgagaaaggatccgagctcggtaccaagcttggcgtaatcatggtcatagctgtttcctgtgtgaaattgttatccgctcacaat

SEQ ID NO: 1332 - DNA, 555 bp, Homo sapiens
  misc_feature 357, 409, 427, 489, 551: n = A,T,C or G
tttttttttttggttattaaataatttgtttattgtacggcatttacaaagaaaacagacaatgccctcagtagaaagaataaaaatgtatttagggctttatttttaactgacagcaaatagaaatcctttagtgagatcgtggcaatttgacagtattataattaagctcaataaaggtacatggggtacctggaagatcaagatctacagctgcctatttccacatctttcaatccatctggctccttaaataggggaaaaagcccttatttggtggagaagcatttccaaaatgaagttacaggttctattaaaacttactgtcacatcaactgttaaaatagggccttttgngttttgttatttcaccttaatatcaccagaattcctgtaattccacaattgngattttactatgtagaanataattcagttctagtctattgctttagatgtaaaaacagctgaaaacccaaagtggattanaattgctgaaggatttccctgccgttgtttgatacaatctattctcttgattcttgataggngcat

SEQ ID NO: 1333 - DNA, 470 bp, Homo sapiens; identical to SEQ ID NO: 693
  misc_feature 201, 270: n = A,T,C or G

SEQ ID NO: 1334 - DNA, 565 bp, Homo sapiens
  misc_feature 25: n = A,T,C or G
ttttttttttttttttagaaaaggnggaaatggccttttatttaaatatgaggaaaaaattagaattaagtacagtaagattatttttaaaaaagcagacaagttagaacaaacattttattattaaaataaacttttgtataaaagcattacagatcaaaagctgtatttacacttatcgattcaaggtccaattatgcatcaaacattgaatggcacagcaatggtttacatatgcaagtaaattggacatacaaacacttagattccacctctaccaaataccttgattaatgcaaagaggagggggaatactgacacaggaaacctgcccagaaactagactggcagagatgtcaggttaacaaactgctaaaagttacatctccaaaaaggcacttatcattgttataaaagtgcttaaaatctaaacttgaaccttgtgcctggtttataaatttacaagaaactgcaaagaaccacagactagtttttaatatcaagtttccatacaaaattgtccaagaatttatttgcaataccttacatgtgaactgaaataaac

SEQ ID NO: 1335 - DNA, 586 bp, Homo sapiens
  misc_feature 296, 511, 512, 583: n = A,T,C or G
ttttttttttttttttttttatggaatatttgatttattctaaaatttgtgaatatttaaaaattttcaatataaaaagccagaggcctgggcagggacaggcccaaagatgtctctgcctgagaactaagtgatggggcaaacccacttaatagtggccagagagcaaaggagagttataagaaaccgtaaaccaggctagggcagattcaccttcctaggggcaagacaaagaaggaagggggtagacagagcctactaagtaagctgcttatcccttctgccacatggttcanattcaatctaagaatgtgtatggtgacacctagtcagagacaggccctggcaggggacataaaaaacaaataaggcttcacccttcctctcaaagagcttacatgcaaagacgaaggaccaaccaggtacagaccagatgcacagttactgagcttatgctttgataaatgcttagccagcagcatcaatgaacactatgaaagcccaaaaagannaggcagttgaatctttcctcaggccatccagcattattagttaaaatctgatttcatccttgggggatgcntac

SEQ ID NO: 1336 - DNA, 593 bp, Homo sapiens
tcggccagctggatctcccacaaggtttccttgttaaaagggtgcttaagtaacctggccggcagcacgacttatgatgaagcacgaagaagccaggttctgtgtcgatcactctctcagtcccctcaactgctcatcttaaactatttggttcctgacacgtttccaaaaggggaaaggggaaaaggggaaggggggaaggggaacataaaaagtatttgttacatttaaaaagggggggaaggggaaagagctgtatctatgttcacctcattcaacttccttgagttatggcactatgatgttgcttaattaggtaagacatggatatttgcaccgagtgcaaatactgttcataacaaggtcatagctagaaagacagatgggctcaagtgtggacaaataatgtcatcaaggtaatagatcaaaaatattaaagccctataaaagatctgagcagtcaactccaaaacatccacatgacaaagtccttaaaatacaaatctcattactcttactcatgcaactgctaaaaaatagtgtgcagatatgtatttatatttgccttaaccttcaaaatctagggacataaa

SEQ ID NO: 1337 - DNA, 585 bp, Homo sapiens
  misc_feature 555: n = A,T,C or G
tggtattatgaggcctcaggtgccttggggtacattgtcatgctataagggatgtatatcataaggtatggtggaagaggggccttatgtgaatgattgccacatactgtttctgttgctgctttttttccgattcctttttgtcattggatttgtttgttttgtcatgtggtgaatggtgttttagttattgtgttgctgccagaatcagaatccagttcttgttcttactgccttatagttattgtgttgccaccagaatcagaatccagttcttgttcatactgccttgtagtgagggcagtttaatatctacaaagaagcttttagaagctgaaaaagtcaatgtgattgtgcattctgcttttaagaagctgtttcagctatgaactgtgtatgtgctataagtgtgaggtaccataagttatttaatttttaaaagaggaaactcctgagtgagctgtttaagaaatctgagtgtgatctattgttacgttatttataactaggtaaaatgtctgtcgtgatagatttcttttaacgttcagatactgnggttgggttgtctatatttaatatgcagat

SEQ ID NO: 1338 - DNA, 346 bp, Homo sapiens; identical to SEQ ID NO: 397

SEQ ID NO: 1339 - DNA, 617 bp, Homo sapiens; identical to SEQ ID NO: 350
  misc_feature 31: n = A,T,C or G

SEQ ID NO: 1340 - DNA, 654 bp, Homo sapiens; identical to SEQ ID NO: 394
  misc_feature 29, 30: n = A,T,C or G

SEQ ID NO: 1341 - DNA, 566 bp, Homo sapiens
cggccgctctgcctgcgcgctgctcctgctctgctacctgaatgttgtaccatctttgggtaggcagacttccctgacgacatcagtgatacccaaagctgagcagagcgtggcttacaaagactttatttattttactgtctttgaaggaaacgttcgcaacgtttctgaagtctcggttgagtatttatgctctcagccttgtgttgtcaatttggaagcagttgtttcatctgagttcagaagtagcattcccgtgtacaaaaaaaggtggaagaatgagaaacatcttcacaccagcaggacacaaatagtacatgtgaaatttccaagcattatggtttacagagatgattatttcatcagacattccatctctgtatctgcagtgatagtacgcgcctggattactcacaaatacagtggcagagactggaatgttaaatgggaggaaaacttgctccatgctgtagcaaagaattataccctcctgcagaccatcccgccttttgaacgccctttcaaagatcatcaagtgtgccttgagtggaacatgggttatattt

SEQ ID NO: 1342 - DNA, 652 bp, Homo sapiens; identical to SEQ ID NO: 799
  misc_feature 31: n = A,T,C or G

SEQ ID NO: 1343 - DNA, 550 bp, Homo sapiens; identical to SEQ ID NO: 731
  misc_feature 2, 32: n = A,T,C or G

SEQ ID NO: 1344 - DNA, 499 bp, Homo sapiens; identical to SEQ ID NO: 792

SEQ ID NO: 1345 - DNA, 693 bp, Homo sapiens; identical to SEQ ID NO: 948
  misc_feature 6: n = A,T,C or G

SEQ ID NO: 1346 - DNA, 519 bp, Homo sapiens; identical to SEQ ID NO: 422

SEQ ID NO: 1347 - DNA, 546 bp, Homo sapiens; identical to SEQ ID NO: 802
  misc_feature 11, 25: n = A,T,C or G

SEQ ID NO: 1348 - DNA, 698 bp, Homo sapiens; identical to SEQ ID NO: 689
  misc_feature 37: n = A,T,C or G

SEQ ID NO: 1349 - DNA, 599 bp, Homo sapiens; identical to SEQ ID NO: 572

SEQ ID NO: 1350 - DNA, 641 bp, Homo sapiens
  misc_feature 610, 611: n = A,T,C or G
ctattggagtgagacgagcagcagcagctgtggaacccagcagctcccagaggtgctgcagtgccagccccagcattaccactgctaccatcagtcaagccaagcccagcagcctccagaaaaaaatgtagtgtatgagcgagtgaggacctacagtgggcccatgaacaaggtggtgcaggccttggaccccttcaactcacgggaagtgctctcccctctcaaaaccacctcctcctaccaaaatttggtttggagcgaccattctcaggaactccattctccaactttaaaaatatctacatgtgccccaagtactctacatataacccaaaatactgaacaggaacttcattctccaacagtgaaacttactacatatccacagaccactattaggaaatatgtagtacaaaatcctgaacaggaaccactgtctcaattcctaagaggaagccatttcttcccaggaaacaatgttatttatgaaaaaacaataagaaaagtggagaagctaaatactgatcaggggtgccatcctcaggctcaatgccatcatcacattatccaacagccccaggtcatccactctgcacactggcaacaaccnngattctagccagcaaatccaagccatcaca

SEQ ID NO: 1351 - DNA, 365 bp, Homo sapiens
  misc_feature 1, 28: n = A,T,C or G
nctcctatagggcgattgggccctctanatgcatgctcgagcgaagcagctggctctgtttgcgcaggaagtccacgggggcagccacaccatagctgctcttgcccaaggcagctctcgggggtcccgaggaggcatgcgagtgcgagcccgcttccagctggcccaggtgggccacatagccgtctgacaggaactggcactgcgcctgtagcttccgcacggcacggcccacgatgtaggtctggctcggggacagccccagcgccgcgtatacagccacatctttgggagacccataaccggccacgatgttcagttctacctcctgcaccaggctctgcagaaacattgccttctggcgt

SEQ ID NO: 1352 - DNA, 501 bp, Homo sapiens
  misc_feature 25, 437, 468, 495: n = A,T,C or G
ttttttttttttttttttttggttngatgacatagataattcaggttgtcatttataattttagagtttgcttcacatatacaatgctgtgttacgaaacaatgaacacttttataaaaaatttatttcacacttttatacaaatatccacaggtaatttctaatcatgaaataattttacaatgctagttagtacaaaaatgtatcaaatgcaaacagaccagtgacttgacttgagatgacatttttaacaaccataaatctaaacaccataacatctttgtttctttgttgaaccaccctcccaacacccttttcaggacattcatcttttttttagtaacacaggtctaaaaacactgtcaaagtatcagctccttagcaatctagcaatctaaacacattagggacacaagttccccaagcaagaaactganactttaaacactgttataacctgttttacanaaatttttgtaacaaaatatattttgngactaa

SEQ ID NO: 1353 - DNA, 474 bp, Homo sapiens
  misc_feature 234, 266, 283, 357, 364, 382, 419: n = A,T,C or G
ctttttttttttttttccatataaatcttttacttaaaagtcatataaaagaataaaaaatgcagatttctgaatcaactgtagataaggaagcaaatgatgttgaaaggtgcccattaatttaaaatttcatcataggaatttgggtgaccttttgcactcagtattaaaaaaaaccatcaagttgctctttggaacagtagcatttaggtttgtttttttttttttttttgncaaacttgtttatttctttgggatgttgctgngtgtcatggaaaaaacnctcccctgaaaactgtaaccaaacaaagtttggttaaaacaaagttggttcctttgttttcatggaaatgtcanacaactntgaaaagctaaggaagcntgttgaactgaaggtctggctttggtaaattaggcanagatgttctcagcagcaaacaggtaaaatctgacatcgagaagcattattttaat

SEQ ID NO: 1354 - DNA, 588 bp, Homo sapiens; identical to SEQ ID NO: 595
  misc_feature 425, 581: n = A,T,C or G

SEQ ID NO: 1355 - DNA, 611 bp, Homo sapiens
ttttttttttttttttttgttggaaataatttttatttaacagatataaaaaaaattcttaacatttacaaattgtacaaagattggtagcttttatatttttttaaaaatgctatactaagagaaaaaacaaaagaccacaacaatattccaaattataggttgagagaatgtgactatgaagaaagtattctaaccaactaaaaaaaatattgaaaccacttttgattgaagcaaaatgaataatgctagatttaaaaacagtgtgaaatcacactttggtctgtaaacatatttagctttgcttttcattcagatgtatacataaacttatttaaaatgtcatttaagtgaaccattccaaggcataataaaaaaagaggtagcaaatgaaaattaaagcatttattttggtagttcttcaataatgatgcgagaaactgaattccatccagtagaagcatctccttttgggtaatctgaacaagtgccaacccagatagcaacatccactaatccagcaccaattccttcacaaagtccttccacagaagaagtgcgatgaatattaattgttgaattcatttcagggcttccttggtccaaataaa

SEQ ID NO: 1356 - DNA, 568 bp, Homo sapiens
agcgtggtcgcggccgaggtgccaactcacacaaggcaggtgagtgaggaaatccagagttgccatggagaaaaatccagtgtcagcattcttgctccttgtggccctctcctacactctggccagagataccacagtcaaacctggagccaaaaaggacacaaaggactctcgacccaaactgccccagaccctctccagaggttggggtgaccaactcatctggactcagacatatgaagaagctctatataaatccaagacaagcaacaaacccttgatgattattcatcacttggatgagtgcccacacagtcaagctttaaagaaagtgtttgctgaaaataaagaaatccagaaattggcagagcagtttgtcctcctcaatctggtttatgaaacaactgacaaacacctttctcctgatggccagtatgtccccaggattatgtttgttgacccatctctgacagttagagccgatatcactggaagatattcaaaccgtctctatgcttacgaacctgcagatacagctctgttgcttgacaacatgaagaaagctctc

SEQ ID NO: 1357 - DNA, 589 bp, Homo sapiens; identical to SEQ ID NO: 903
  misc_feature 425, 426, 588: n = A,T,C or G

SEQ ID NO: 1358 - DNA, 442 bp, Homo sapiens; identical to SEQ ID NO: 336
  misc_feature 382: n = A,T,C or G

SEQ ID NO: 1359 - DNA, 478 bp, Homo sapiens; identical to SEQ ID NO: 314

SEQ ID NO: 1360 - DNA, 312 bp, Homo sapiens; identical to SEQ ID NO: 691
  misc_feature 6: n = A,T,C or G

SEQ ID NO: 1361 - DNA, 200 bp, Homo sapiens
  misc_feature 44, 73, 119, 135, 140, 193: n = A,T,C or G
ttttttttttttttttttttttgcaggctctaattttactgcanaaacgggttggctgaagggaacaggccancgaggtgggctcaggacacccccaacagccaggatgggggcacggnaggatctggcgcccanaagtnagagggaggcccaggaaatttgcgccagttttcctgccttgtgggtgcctgangagccct

SEQ ID NO: 1362 - DNA, 638 bp, Homo sapiens
  misc_feature 89, 541, 543, 585: n = A,T,C or G
ttttttttttttacaataggccagtagaattcttatgagaacagcttttaagcacttcaatggagtgtcatttttttggtagcttccanaaggtgccaaacaggtttcaacatcatattaattagaaatacccataataattataacaacaataaaaaggtataatatggtacataaatatggaagagcagtttgtaatatgaatacattttctctagacgagatcacagttttattttgtaaatattacatttaagtatatatatacacacatatatgtacaactatatatacatgtgcatatatatgtaaatttatatttatatataatatctttatatagatagatatctgcagacaggttattgattatagagacccaagaaagcaactcaataattgttcaaagttttcctcactgactgctggtgtgtagtttaagaagcccccatttgtttgcactcagaatgccttatcttcttttaatggaacacttgatgtggaattttaagtctgagaagtgaggtgccttctgaagaananattttagagactcccttcctctataagttggaaatgaccagnagtcttaagtagacgacagttagctgactttgacattgtaggacgtaatcagc

SEQ ID NO: 1363 - DNA, 401 bp, Homo sapiens
tgggccctctagatgcatgctcgaggggtgtgttcctacttagctttgtacagcccagatgtgatatttctacaggaagttattcccccatattatagctacctaaagaagagatcaagtaattatgagattattacaggtcatgaagaaggatatttcacagctataatgttgaagaaatcaagagtgaaattaaaaagccaagagattattccttttccaagtaccaaaatgatgagaaaccttttatgtgtgcatgtgaatgtgtcaggaaatgagctttgccttatgacatcccatttggagagcaccagagggcatgctgcggaacgaatgaatcagttaaaaatggttttaaagaaaatgcaagaggctccagagtcagctacagttatatttgc

SEQ ID NO: 1364 - DNA, 401 bp, Homo sapiens
ttgaaggctgagtttttgagggcagaaagctagctatgggtagccaggtgttacaaaggtgctgctccttctccaacccctacttggtttccctcaccccaagcctcatgttcataccagccagtgggttcagcagaacgcatgacaccttatcacctccctccttgggtgagctctgaacaccagctttggcccctccacagtaaggctgctacatcaggggcaaccctggctctatcattttccttttttgccaaaaggaccagtagcataggtgagccctgagcactaaaaggaggggtccctgaagctttcccactatagtgtggagttctgtccctgaggtgggtacagcagccttggttcctctggggggtgagaataagaatagtggggaggga

SEQ ID NO: 1365 - DNA, 401 bp, Homo sapiens
  misc_feature 316: n = A,T,C or G
ctagtaacggccgccagtgtgctggaattcgcggccgcgtcgacgagctctgcagtgtgaggtatgacatactagtatataggatacttttagtactagctgacttaccttctgaggtttaactagagaaagaaatctctgtcttgtagtgtcaaatccatttaaataatacaagttattaactgtgaatacatctcctgataattaaatgcatatttatttaaatcacaattttaatggctacatagaaggccattatttggaaaccccattatttacttaaaaaattatttttttatttttaatttttttgtgngtataataagtgctgcaaggcataattgcatgtaaatccttttctaccattctaattattgacttggaataaattattcaatata

SEQ ID NO: 1366 - DNA, 201 bp, Homo sapiens
cagtattkcataatgatctgcatcagtkgtraaggggaattggtatattcacagactgtagactttcagcagcaatctcagaagcttacaaatagatttccatgaagatatttgtcttcagaattaaaactgcccttaattttaatatacctttcaatcggccctgccatttttttctaagtattcaattaagggggaatt

SEQ ID NO: 1367 - DNA, 401 bp, Homo sapiens
  misc_feature 353, 383: n = A,T,C or G
gggccctctagatgcatgctcgagaaaaccagccagctgtggtgcatctacagggccaagggtcagcaattcaagtcaagaatgatctttcaggtggagtgctcaatgactggtctcgcatcactatgaaccccaaggtgtttaagctacatccccgcagcggggagctggaggtactggtggacggcacctactttawtttatagcaggtagaagtatactacatcaacttcactgactttgccagctatgaggtggtggtggatgagaagcccttcctgcagtgcacacgcagcatcgagacgggcaagaccaactacaacacttgctataccgcaggcgtctgccttctnaaggcccggcagaagaatcgccgtcaaganggggcacgcttacatctt

SEQ ID NO: 1368 - DNA, 401 bp, Homo sapiens
ctagtaacggccgccagtgtgctggaattcgcggccgcgtcgacatcgccttcaagaaacacaagttaaatacaaagatgcaaacaggttaaaataaaagaatggaataatatataccatgcttacgctagtcaagagaaagctagagtagaaatactaatatcaggcaaagcatatttcagagttaaacacaacatttttccactatttgcagtcaaaagtatcgttaacactctctttactctgctcaaagttacagagttcttttgtataaacattagaacacttatcacagcctgcctataatggagaataattccatgttgtatactatacaacactcttactaaagtccattagacagaaatatgtagcatttgagacaccttccaattataaaa

SEQ ID NO: 1369 - DNA, 401 bp, Homo sapiens
tttgtttctctgaattcatatctttttcagtggactcatttatactaaaactaaattgatcagtttgtctgttttcattatccagtgaacagctaaaagcatccataagggattgactattataattattacaatcctgtaaatcgttttgtaatgtccttttatcacagttatgcatgacggctacaacaagaacattcttctcatctggcagacaagccaggtttccacatttcttctctcccacttcaacagcactgcattgatcatcccaactatagtttctcttaattaactggtcttctgcaacagcattttcatcaatccacattgtggcaatctctggatttagattacagtcctgtccattagcacagtgatcctcttcctctgtggtcagg

SEQ ID NO: 1370 - DNA, 401 bp, Homo sapiens
gccctctagatgcatgctcgagaggacaaaaacccacaccggacatagatcacaawacttcctagaactctcctttaaatcggaagaaatttgtaaaatgtgatatgaaatacaactctacaaacatccaaaatacatttctggtcataattaatcgtatttgacattttcctctaagtttaatgcaactttaaataatttaggctttttcctaacatgatagatttttttcagtatcagaaatggacaagaggaaactccagtaaagagaaaagcaatgaatttaaaagggtgcagaatctgaaaacaaactaaccacaatgtacatttaattgtacttaattgtatatttcatttaaatagtccttctcaggggtttaataatttagaatcaatagttc

SEQ ID NO: 1371 - DNA, 401 bp, Homo sapiens
gmccgacgtgactcctctaccggggcatacgaagattcttcatatctccttccagtggctcaatttagattttgggaaggagcagaacaagtgaaacacagaaaactgaagagaagaaatcctcattttggacctatatttctccttgactattwcttaatatccatcctacccatcgttctaatggtktaactttgctctgaatttataaatagtaaaggccaaagacatagaatatacatttagtagctttataccaagaaatttgccttgaaagctgctgttcgtggagggaaaagtgtagcaaattcctgtctatttttattttttatttttttttaacaaagacaagatttatgtccctagattttgaaggttaaggcaaatataaatacatatct

SEQ ID NO: 1372 - DNA, 401 bp, Homo sapiens
aggaatacgagtggagcccccaactaaaaccacctcatcaatctcagtcttttccaggtggccttctttcaatacttgctgaatgggtaccagtattttctgaaagaggtcttcattaagggtatcaaagagtttccgtgatatttctgtttcaaataaaacctgactttctccacttttcttatcagaaaggccacgtccaaacccactgttcacgcgatggtcatctgctgaggaaagtttgtcttttggcagttcagtgtcactactgtgaggttccttcctgtcctgctcctccaccgttagtaatactgacaactgagcagattgatgaagagtcagatttaatttgaccatttccacagcttgtctcaatctgtggatttcctctttcctagagg

SEQ ID NO: 1373 - DNA, 401 bp, Homo sapiens
aactataaattccggtatgcacgagaagaggacagaatctgatttactgattgttcctcatttaaaccatgacttaatctctatcttaggatttaactatctttattttctggttaaaatttttaaaaaaagtggggagagggtgagagtcgtaaggggcaatagcaatagagattacactgtgctgacacagagactaaattctagtcagagtgaagacccatataaaaggccggctgatggtttaaaggaagtaactacatggagtctaatcgagacattcatgagttacatctcattattagccttagtaatgtaagaaaacaattctcaacaaaactggagtccacagttgtcaagtatgctttctcaggcacgggtaggtaaaagtctggagaaat

SEQ ID NO: 1374 - DNA, 601 bp, Homo sapiens
  misc_feature 553: n = A,T,C or G
agcacacggagcactgcaggcgccgggttgggacagcgtcttcgctgctgctggatagtcgtgttttcggggatcgaggatactcaccagaaaccgaaaatgccgaaaccaatcaatgtccgagttaccaccatggatgcagagctggagtttgcaatccagccaaatacaactggaaaacagctttttgatcaggtggtaaagactatcggcctccgggaagtgtggtactttggcctccactatgtggataataaaggatttcctacctggctgaagctggataagaaggtgtctgcccaggaggtcaggaaggagaatcccctccagttcaagttccgggccaagttctaccctgaagatgtggctgaggagctcatccaggacatcacccagaaacttttcttcctccaagtgaaggaaggaatccttagcgatgagatctactgcccccctgagactgccgtgctcttggggtcctacgctgtgcaggccaagtttggggactacaacaaagaagtgcacaagtctgggtacctcacttctgagcggntgatccctcaaagagtgatggaccagcacaaacttaccagggaccagt

SEQ ID NO: 1375 - DNA, 611 bp, Homo sapiens
atgggcatgatggacatgagtgtgctagacgaaactgaagtggcgaatagcagtgctccagattttggggaggatggcacggacggccttctcgattccttttgtgatagtaaagaatacgtggctgcacagctgagacagctcccggctcagcccccagagcatgctgtggatggggaaggatttaagaacactttggaaacttcatcgttgaacttcaaagtaactccggacattgaagaatcccttttggagccagaaaatgagaaaatactcgacattttgggggaaacttgtaaatctgagccagtaaaagaagaaagttccgagctggagcagccatttgcacaggacacaagtagcgtggggccagacagaaagcttgcggaggaagaggacctatttgacagcgcccatccggaagagggtgatttagatttggccagcgagtcaacagcacacgctcagtcgagcaaggcagacagcctgttagcggtagtgaaaagggagcccgcggagcagccaggcgatggcgagaggacggactgtgagcctgtagggctagagccggcagttgagcagagtagtgcggcctccgagctcgcggaggc

SEQ ID NO: 1376 - DNA, 601 bp, Homo sapiens
gttcgtggttgccttggtcctcctgaacgtcgcagcggcgggagccgtgccgctcttggccaccgaaagcgtcaagcaagaagaagctggagtacggccttctgcaggaaacgtctccacccaccccagcttgagccaacggcctggaggctctaccaagtcgcatccggagccgcagactccaaaagacagccctagcaagtcgagtgcggaggcgcagaccccagaagacacccccaacaagtcgggtgcggaggcaaagacccaaaaagacagctccaacaagtcgggtgcggaggcaaagacccaaaaaggcagcactagcaagtcgggttcggaggcgcagaccacaaaagacagcactagtaagtcgcatccggagctgcagactccaaaagacagcactggcaaatcgggtgcggaggcgcagaccccagaagacagccccaacaggtcgggtgcggaggcaaagacccaaaaagacagccctagcaagtcaggttcggaggcgcagaccacaaaagatgtccctaataagtcgggtgcggacggccagaccccaaaagacggctccagcaagtcgggtgcggaggatcagacc

SEQ ID NO: 1377 - DNA, 601 bp, Homo sapiens
  misc_feature 10: n = A,T,C or G
gcaggcgccnggttgggacagcgtcttcgctgctgctggatagtcgtgttttcggggatcgaggatactcaccagaaaccgaaaatgccgaaaccaatcaatgtccgagttaccaccatggatgcagagctggagtttgcaatccagccaaatacaactggaaaacagctttttgatcaggtggtaaagactatcggcctccgggaagtgtggtactttggcctccactatgtggataataaaggatttcctacctggctgaagctggataagaaggtgtctgcccaggaggtcaggaaggagaatcccctccagttcaagttccgggccaagttctaccctgaagatgtggctgaggagctcatccaggacatcacccagaaacttttcttcctccaagtgaaggaaggaatccttagcgatgagatctactgcccccctgagactgccgtgctcttggggtcctacgctgtgcaggccaagtttggggactacaacaaagaagtgcacaagtctgggtacctcagctctgagcggctgatccctcaaagagtgatggaccagcacaaacttaccagggaccagtgggaggaccggatcc

SEQ ID NO: 1378 - DNA, 601 bp, Homo sapiens
gcagagttgccatggagaaaattccagtgtcagcattcttgctccttgtggccctctcctacactctggccagagataccacagtcaaacctggagccaaaaaggacacaaaggactctcgacccaaactgccccagaccctctccagaggttggggtgaccaactcatctggactcagacatatgaagaagctctatataaatccaagacaagcaacaaacccttgatgattattcatcacttggatgagtgcccacacagtcaagctttaaagaaagtgtttgctgaaaataaagaaatccagaaattggcagagcagtttgtcctcctcaatctggtttatgaaacaactgacaaacacctttctcctgatggccagtatgtccccaggattatgtttgttgacccatctctgacagttagagccgatatcactggaagatattcaaatcgtctctatgcttacgaacctgcagatacagctctgttgcttgacaacatgaagaaagctctcaagttgctgaagactgaattgtaaagaaaaaaaatctccaagcccttctgtctgtcaggccttgagacttgaaaccagaagaatgt

SEQ ID NO: 1379 - DNA, 601 bp, Homo sapiens
gagacccacaaataaaggggagcgcaggggttgcggcgggactaggagcgcggcggggccggcggcagagctgtccggctgcgcggtggcccggggggcccgggcggcagggcaagcagcgcggcctcggcctatgcgaccggtggcgccggcgcggcttctgcctggagaggattcaagatgaccaacgaagaacctcttcccaagaaggttcgattgagtgaaacagacttcaaagttatggcaagagatgagttaattctaagatggaaacaatatgaagcatatgtacaagctttggagggcaagtacacagatcttaactctaatgatgtaactggcctaagagagtctgaagaaaaactaaagcaacaacagcaggagtctgcacgcagggaaaacatccttgtaatgcgactagcaaccaaggaacaagagatgcaagagtgtactactcaaatccagtacctcaagcaagtccagcagccgagcgttgcccaactgagatcaacaatggtagacccagcgatcaacttgtttttcctaaaaatgaaaggtgaactggaacagactaaagacaaactggaacaagcccaaaatg

SEQ ID NO: 1380 - DNA, 409 bp, Homo sapiens
  misc_feature 20, 74, 234, 254, 341, 348, 350, 380: n = A,T,C or G
gcacgctactagagtacaangtagtgggtcgctgcctgcccacccccaaatgccacacgccgcccctctaccgnatgcgaatctttgcgcctaatcatgtcgtcgccaagtcccgcttctggtactttgtatctcatttaaagaatatgaagaagtcttcaggggagattgtctactgtgggcaggtgtttgagaagtcccccctgcgggtgaagaacttcgggatctggctgngctatgactcccggagcggnacccacaacatgtaccgggaataccgggacctgaccaccgcaggcgctgtcacccagtgctaccgagacatgggtgcccggcaccgngcccgancncactccattcagatcatgaaggtggagganatcgctggccagcaagtgccggcggccgg

SEQ ID NO: 1381 - DNA, 562 bp, Homo sapiens
  misc_feature 22, 31: n = A,T,C or G
tgagggctcggcgcggggtttnctgttcctncttctgcgcggctgcagctcgggacttcggcctgacccagcccccatggcttcagaagagctacagaaagatctagaagaggtaaaggtgttgctggaaaaggctactaggaaaagagtacgtgatgcccttacagctgaaaaatccaagattgagacagaaatcaagaacaagatgcaacagaaatcacagaagaaagcagaacttcttgataatgaaaaaccagctgctgtggttgctcccattacaacgggctatacggtgaaaatcagtaattatggatgggatcagtcagataagtttgtgaaaatctacattaccttaactggagttcatcaagttcccactgagaatgtgcaggtgcatttcacagagaggtcatttgatcttttggtaaagaatctaaatgggaagagttactccatgattgtgaacaatctcttgaaacccatctctgtggaaggcagttcaaaaaaagtcaagactgatacagttcttatattgtgtagaaagaaagtggaaaacacaagg

SEQ ID NO: 1382 - DNA, 1111 bp, Homo sapiens
  misc_feature 899, 954: n = A,T,C or G
gccaacctcaacttatagtgaaggaagcactccactaacaagtgtgcctgtcagcaccaggctggtggtcagttctgaggctagcaccctttccacaactcctgtcgacaccagcacacctgtcaccacttctactgaagccagttcatctcctacaactgctgaaggtaccagcataccaacctcacctcccagtgaaggaaccactccgttagcaagtatgcctgtcagcaccacgctggtggtcagttctgaggctaacaccctttcaacaactcctgtggactccaaaactcatgtggccacttctactgaagccagttcacctcctccaactgctgaaggtaccagcatgccaacctcaactcctggagaaagaagcactccattaacaagtatgcctgtcagacacacgccagtggccagttctgaggctagcaccctttcaacatctcccgttgacaccagcacacctgtgaccacttctgctgaaaccagttcctctcctacaaccgctgaaggtaccagcttgccaacctcaactactagtgaaggaagyactctattaacaagtatacctgtcagcaccacgctggtgaccagtcctgaggctagcacccttttaacaactcctgttgacactaaargtcctgtgrccacttctactgaagccagttcayctcctaccactgctgaaggtaccagcatgccaacctcaactcctagtgaaggaagcactccattaacacgtatgcctgtcagcaccacactggtggccagttctgaagctagcaccctttcaacaactcctgctgacwccarcacwcctgtgaccacttatactgaagccagttcatctcctacaactgctgaaggtaccagcmtgccaacctcaactnctagtgaaggaagcactccattaacaagaatgcctgtcagcaccaygctggtggncagttctgaggctagcaccctttcaacaactcctgttgacaccaacactcctgtgaycacttctactgaagccagttcatctcctacaactgctgaaggtaccagcatgccaacctcaacttatactgaaggaagcactccattaacaagtatgcct

SEQ ID NO: 1383 - DNA, 609 bp, Homo sapiens
cacttcaactgaagccagttcctctcctacaactgctgatggtgccagtatgccaacctcaactcctagtgaaggaagcactccattaacaagtatgcctgtcagcaaaacgctgttgaccagttctgaggctagcaccctttcaacaactcctcttgacacaagcacacatatcaccacttctactgaagccagttgctctcctacaaccactgaaggtaccagcatgccaatctcaactcctagtgaaggaagtcctttattaacaagtatacctgtcagcatcacaccggtgaccagtcctgaggctagcaccctttcaacaactcctgttgactccaacagtcctgtgaccacttctactgaagtcagttcatctcctacacctgctgaaggtaccagcatgccaacctcaacttatagtgaaggaagaactcctttaacaagtatgcctgtcagcaccacactggtggccacttctgcaatcagcaccctttcaacaactcctgttgactccaacactcctttgaccacttctactgaagcccgttcgtctcctacaacttctgaaggtaccagcatgccaacctcaactcctggggaaggaag

SEQ ID NO: 1384 - DNA, 601 bp, Homo sapiens
agattcttcaagcaatcactatgtcaacagacacaggtgtttcccttccttcatatgaggaagatcagggatcaaaactcattcgaaaagctaaagaggcaccattcgtacccgttggaatagcgggttttgcagcaattgttgcatatggattatataaactgaagagcaggggaaatactaaaatgtccattcatctgatccacatgcgtgtggcagcccaaggctttgttgtaggagcaatgactgttggtatgggctattccatgtatcgggaattctgggcaaaacctaagccttagaagaagagatgctgtcttggtcttgttggaggagcttgctttagttagatgtcttattattaaagttacctattattgttggaaataaactaatttgtatgggtttagatggtaacatggcattttgaatattggcttcctttcttgcaggcttgatttgcttggtgaccgaattactagtgactagtttactaactaggtcattcaaggaagtcaagttaacttaaacatgtcacctaaatgcacttgatggtgttgaaatgtccccttcttaaatttttaagatgaacttagttcta

SEQ ID NO: 1385 - DNA, 516 bp, Homo sapiens
  misc_feature 73, 102, 382: n = A,T,C or G
atttattacacaaaggttgtcacataattggatacttctctactttgtacacaattattctcactctccacanaaaggctgcttaacttctcatctggtggnggcaagcactaaaatcctgattttaacagaatagtagtaaaaatgcctcagtgatttaagttgaaagcagtacactggtacatggctcttgtacccagtatcaggaatgtacaaatgttttttattcaaaaatacaaaataaattatctgtaggcatggacaatgacagcagtaaaccattatatattttgtcaactgaaaccactaactgatggttatagtgattttcagccagcctttttcttcattttctccaactgacttctctgaagttattggngaggaacactgccttgggcttcctgtcacagttcattaataaaggtaaagcactagtctaggagttagaacatgccacctcccataccacctcccattccacccattgcacccattccagggggccttctcttc

SEQ ID NO: 1386 - DNA, 466 bp, Homo sapiens
tagagcagagtacgagtctgaggcggagggagtaatggcaggacaagcgtttagaaagtttcttccactctttgaccgagtattggttgaaaggagtgctgctgaaactgtaaccaaaggaggcattatgcttccagaaaaatctcaaggaaaagtattgcaagcaacagtagtcgctgttggatcgggttctaaaggaaagggtggagagattcaaccagttagcgtgaaagttggagataaagttcttctcccagaatatggaggcaccaaagtagttctagatgacaaggattatttcctatttagagatggtgacattcttggaaagtacgtagactgaaataagtcactattgaaatggcatcaacatgatgctgcccattccactgaagttctgaaatctttcgtcatgtaaataatttccatatttctcttttataataaactaatgataactaatgac

SEQ ID NO: 1387 - DNA, 411 bp, Homo sapiens
  misc_feature 14, 18, 235, 346: n = A,T,C or G
tcggaacacacagntgtncacacctctgtccagagtgttattgagaagttgcaggaagaaaatcgactgttaaaacagaaggtgactcacgttgaagacctcaatgccaagtggcagcgctacaacgccagcagggacgaatacgtgagggggctccatgcgcagctcagggggctgcagatcccccacgagcccgagctgatgaggaaggagatctcccggctcaacagacagntggaagagaaaataaatgactgtgccgaagtgaagcaggagctggcggcctccaggacggcccgggatgctgcgttggagcgggtgcagatgctggaacagcagattctcncttacaaggatgacttcattgtcagaaaggggccgatccgggaaccgggctcaaaagtaggattc

SEQ ID NO: 1388 - DNA, 601 bp, Homo sapiens
  misc_feature 18, 22: n = A,T,C or G
gcagtttcaccaggagcngttnacaagcctggtggagaaacacactcttgagaaagaggagttaagaaaagagctcttggaaaagcaccaaagggagcttcaggagggaagatatgaatctgaaaagcttcaacaggaaaattctattttgagaaatgaaattactactttaaatgaagaagatagcatttctaacctgaaattagggacattaaatggatctcaggaagaaatgtggcaaaaaacggaaactgtaaaacaagaaaatgctgcagttcagaagatggttgaaaatttaaagaaacagatttcagaattaaaaatcaaaaaccaacaattggatttggaaaatacagaacttagccaaaagaactctcaaaaccaggaaaaactgcaagaacttaatcaacgtctaacagaaatgctatgccagaaggaaaaagagccaggaaacagtgcattggaggaacgggaacaagagaagtttaatctgaaagaagaactggaacgttgtaaagtgcagtcctccctttagtgtcttctctggaggcggagctctctgaagttaaaatacagacccatattgtgcaacaggaaaacc

SEQ ID NO: 1389 - DNA, 570 bp, Homo sapiens
actcacacaaggcaggtgggtgaggaaatccagagttgccatggagaaaattccagtgtcagcattcttgctccttgtggccctctcctacactctggccagagataccacagtcaaacctggagccaaaaaggacacaaaggactctcgacccaaactgccccagaccctctccagaggttggggtgaccaactcatctggactcagacatatgaagaagctctatataaatccaagacaagcaacaaacccttgatgattattcatcacttggatgagtgcccacacagtcaagctttaaagaaagtgtttgctgaaaataaagaaatccagaaattggcagagcagtttgtcctcctcaatctggtttatgaaacaactgacaaacacctttctcctgatggccagtatgtccccaggattatgtttgttgacccatctctgacagttagagccgatatcactggaagatattcaaatcgtctctatgcttacgaacctgcagatacagctctgttgcttgacaacatgaagaaagctctcaagttgctgaagactgaattgtaaag

SEQ ID NO: 1390 - DNA, 601 bp, Homo sapiens
ggctcatggcgatgctggtccttttacccggacgagttatgcggcctctgggtggccaactttggcgcttcttgcctcgcggactcgagttttggggcccagccgaggggactgcgagagtcttgctgaggcagttctgcgcgcggcaagcggaggcgtggcgtgcctcggggcgccctggctattgcctgggaacccggcccctcagcactgcgaggccgccacccccgtggtcgcagaagggccccggagactccacgcgcccctcgaagcccgggcctgtttcctggaagtctttagcaatcacatttgctattggaggagctttactggctggaatgaagcacgtcaagaaagaaaaggcagagaagttagagaaggaacggcagcgacacatcggcaagcctttacttgggggaccgttttccctcacaactcatactggggagcgtaaaactgacaaggactacttgggtcagtggttattgatttattttggcttcactcattgccctgatgtctgtccagaagaactagaaaagatgattcaaagtcgtggatgaaatagatagcattacaactctgccagatctaactccac

SEQ ID NO: 1391 - DNA, 479 bp, Homo sapiens
  misc_feature 68, 161, 176, 228, 311: n = A,T,C or G
gccgtcttttgtctttccgtggagctgtcgccatgaaggtcgagctgtgcagttttagcgggtacaanatctaccccggacacgggaggcgctacgccaggaccgacgggaaggttttccagtttcttaatgcgaaatgcgagtcggctttcctttccaanaggaatcctcggcanataaactggactgtcctctacagaaggaagcacaaaaagggacagtcggaanaaattcaaaagaaaagaacccgccgagcagtcaaattccagagggccattactggtgcatctcttgctgatataatggccaanaggaatcagaaacctgaagttagaaaggctcaacgagaacaagctatcagggctgctaaggaagcaaaaaaggctaagcaagcatctaaaaagactgcaatggctgctgctaaggcacctacaaaggcagcacctaagcaaaaaattgtgaagcctgtgaaagtttca

SEQ ID NO: 1392 - DNA, 553 bp, Homo sapiens
  misc_feature 5, 125, 509: n = A,T,C or G
acgancaagtatggtttattacggacaaatggtagaaaaatgttactaatatccatagataagttccttaagtcatgtagagagactgttattaaaagtttgctgcatttttctattgaatcaanaactagctaccagttacagtgccttctaaacacacagttagctttgctttatcaataaccaaataataaactaggtcccaatggttttgtccacatctagattgttcaggtgatcaggaactcttttatttgtgtgctttagcttttagttcttggttatatctccaaatacgaaaaagctgagaggctcctgctgcccccacaaagaaattaacagcaaacagactccaattttttggaataattacaagtgagtatcttgaccaaataaaccctgtagccatcaaaacagcagattgagctgtgctaagtttttctgcaggtctggccatatcagccaatccagcacacaccaacccccatttcataattggagcccagaanaaaactgttctgggacctgctggatgggtgtacaaccggctcaa

SEQ ID NO: 1393 - DNA, 571 bp, Homo sapiens
  misc_feature 48: n = A,T,C or G
gcttaagatatttattcaatgctctcacatttggcctctgtgacccanaaaagcggtagagcagggtaggagcacatgatgcatccttcagccactgcaacctccagagggaccaggtcttcttcaggaaatcttcgttcctggtggatgactgatcagccataacatggggagaagtcctgcgctctccatttctccatcgctggcttctcctgggagtcatgccaatcattggtctggtccccgtcaaagtttccacaggccccacacagtttcccagcatggtcattgctgacaatcacagccaccttcccattggctccaagccacacctggacccctgccttctggcggactagcagggagccatcaggtgtacgactcacggacacagatgctaacttctcagctgggagatccactcggagaccattcacccacacacccttgtttggagtcaacgtcaccatcccatcctggaagaagatgtggacctggcccacagcctccgttttgccatggcagatctggacttcggcaactacacggtaccaggggatggtattctgta

SEQ ID NO: 1394 - DNA, 395 bp, Homo sapiens
  misc_feature 167, 308, 353: n = A,T,C or G
ccatccagcgctggctgaaggggcaaggggtctacctaggtatgcctggttgcctgcctgtatacgacgccctggccggggagttcatcagggcctctggtgtggaggcccgccaggccctcttgaagcaggggcaagataacctctcaagtgtgaaggagactcanaagaagtgggccgagcaatacctgaagatcatggggaagatcttagaccaaggggaggacttcccagcatcagagatgacacggatcgccaggctgattgagaagaacaagatgagtgacgggaagaaggaggagctccanaagagcttaaacatcctgactgccttccagaagaagggggccganaaagaggagctgtaaaaaggctgtctgtgattttccagggtt

SEQ ID NO: 1395 - DNA, 457 bp, Homo sapiens
  misc_feature 21: n = A,T,C or G
cctcatccgcctccttgctgncacgcctccgccgcgcgcctcctccgccgccgcggactccggcagctttatcgccagagtccctgaactctcgctttctttttaatcccctgcatcggatcaccggcgtgccccaccatgtcagacgcagccgtagacaccagctccgaaatcaccaccaaggacttaaaggagaagaaggaagttgtggaagaggcagaaaatggaagagacgcccctgctaacgggaatgctgagaatgaggaaaatggggagcaggaggctgacaatgaggtagacgaagaagaggaagaaggtggggaggaagaggaggaggaagaagaaggtgatggtgaggaagaggatggagatgaagatgatgaggatgacgatgtcgataccaagaagcagaagaccgacgaggatgactagacagcaaaaaaggaaaagttaaact

SEQ ID NO: 1396 - DNA, 601 bp, Homo sapiens
  misc_feature 580: n = A,T,C or G
aagaataaacagctgcagaagcctcagaaaaataagcccttacttgtagatgttgatctcagcttgtcagcatatgccaatgccaaaaagtattatgatcacaagagatatgctgctaagaaaacacaaaagactgttgaagctgctgagaaggcattcaagtcagcagaaaagaaaacaaagcaaacattaaaagaagttcagactgttacctctattcaaaaagcaagaaaagtatattggtttgagaaatttctgtggttcattagctcagagaactatctaattataggtggacgagatcagcaacagaatgaaataattgtgaaaagatacttgacaccaggagacatttatgtacatgctgatcttcatggagctactagctgtgtaattaagaatccaacaggagaacccatccccccacggaccttgactgaagctggcacaatggcactttgctacagtgctgcttgggatgcacgagttatcactagtgcttggtgggtgtaccatcatcaggtatctaaaacagcaccaactggagaatatttgacaacaggaagcttcatgataagangaaaaaagaatttcttcctcc

SEQ ID NO: 1397 - DNA, 601 bp, Homo sapiens
gaacctcagttcctttcctcatggactttatgttgatctcttccttttgtgctactttgggctttcgcataacatggtgcctgggttgcaagggtgagtgttccaagacacagaaagccagaagttagctatattgccttttatgacttagtcttgaaagtcatgtggtgtcattttcattgtattctctttataaagacagccacaaagtcacactcagtttcagggggagaggaaaaagactctgtctcttgatggggaatgatgaaatattgctgtgagtatttttagaaaaaacagtttgctcctctatattactaaataaattgtcaattctctgtaatttacttgacctgtctccagtgtttgacagttatcattccttccttgaatacattcttggatttcagggtatcatgctcttgattttcctcttaacttactgagtgctccttctcagactattcagttggttcttacctcaatagctcctggcctgaagatcttctcatttctagctgcacactcttccttttcttatttcacctatcctcacaactgtaagtacagtcatgtgtcacttaacaacggggatatgtgt

SEQ ID NO: 1398 - DNA, 573 bp, Homo sapiens
ggaagccggaggagcagtggtggggggccctctccgggggctggggagggatcccccagtgctactgcgtccatactctctggctttgggggcatcctggggctgggcagcctaggcctgggctctgccaacttcatggagctgcagcagcagatgcagcggcagctgatgtccaatcctgagatgctgtcacagatcatggagaaccccctggtccaggatatgatgtctaaccctgatctgatgcgtcacatgattatggccaacccccagatgcagcagttgatggagcggaaccctgagatcagccacatgctcaataaccctgaactcatgaggcagacaatggagcttgctcggaatccagccatgatgcaagagatgatgcggaaccaggaccgggccctgagcaaccttgagagcatccctggagggtataatgccctccgccgcatgtacacggacatccaggagcccatgttcagtgctgcccgggaacagtttggcaacaatcccttctcttccctggccgggaactccgacagctcatcctcccagcctctgcggacttga

SEQ ID NO: 1399 - DNA, 581 bp, Homo sapiens
acctgcgcaatgcagaggctgcaggtagtgctgggccacctgaggggtccggccgattccggctggatgccgcaggccgcgccttgcctgagcggtgccccgcaggcctcggccgcggacgtggtggtggtgcacgggcggcgcacggccatctgccgggcgggccgcggcggcttcaaggacaccacccccgacgagcttctctcggcagtcatgaccgcggttctcaaggacgtgaatctgaggccggaacagctgggggacatctgtgtcggaaatgtgctgcagcctggggccggggcaatcatggcccgaatcgcccagtttctgagtgacatcccggagactgtgcctttgtccactgtcaatagacagtgttcgtcggggctacaggcagtggccagcatagcaggtggcatcagaaatgggtcttatgacattggcatggcctgtggggtggagtccatgtccctggctgacagagggaaccctggaaatattacttcgcgcttgatggagaaggagaagccagagattgcctgattcctatggggataacctctgagaatgtggctgagcgg

SEQ ID NO: 1400 - DNA, 581 bp, Homo sapiens
gggaggagccaagccgccatggcctaccacagcttcctggtggagcccatcagctgccacgcctggaacaaggaccgcacccgagaagacagggtggcctagcagggcctgaaggacttcagggggcccctgcaaggcagaagaggagagactgagtcatgaaagagattgccatctgccccaacaaccatgaggtgcatatctatgaaaagagcggtgccaaatggaccaaggtgcacgagctcaaggagcacaacgggcaggtgacaggcatcgactgggcccccgagagtaaccgtattgtgacctgcggcacagaccgcaacgcctacgtgtggacgctgaagggccgcacatggaagcccacgctggtcatcctgcggatcaaccgggctgcccgctgcgtgcgctgggcccccaacgagaacaagtttgctgtgggcagcggctctcgtgtgatctccatctgttatttcgagcaggagaatgactggtgggtttgcaagcacatcaagaagcccatccgctccaccgtcctcagcctggactggcaccccaacaatgtgcttgcttggcttgcc

SEQ ID NO: 1401 - DNA, 581 bp, Homo sapiens
ccagcccggcgcggcccttttccgttagcgttgctgcttttgttcctgctcggccccagattggtccttgccatctccttccatctgcccattaactctcgcaagtgcctccgtgaggagattcacaaggacctgctagtgactggcgcgtacgagatctccgaccagtctgggggcgctggcggcctgcgcagccacctcaagatcacagattctgctggccatattctctactccaaagaggatgcaaccaaggggaaatttgcctttaccactgaagattatgacatgtttgaagtgtgttttgagagcaagggaacagggcggatacctgaccaactcgtgatcctagacatgaagcatggagtggaggcgaaaaattacgaagagattgcaaaagttgagaagctcaaaccattagaggtagagctgcgacgcctagaagacctttcagaatctattgttaatgattttgcctacatgaagaagagagaagaggagatgcgtgataccaacgagtcaacaaacactcgggtcctatacttcagcatcttttcaatgttctgtctcattggactagc

SEQ ID NO: 1402 - DNA, 468 bp, Homo sapiens
gaattgggaccgctggcttataagcgatcatgtttctccagtattacctcaacgagcagggagatcgagtctatacgctgaagaaatttgacccgatgggacaacagacctgctcagcccatcctgctcggttctccccagatgacaaatactctcgacaccgaatcaccatcaagaaacgcttcaaggtgctcatgacccagcaaccgcgccctgtcctctgagggtcccttaaactgatgtcttttctgccacctgttacccctcggagactccgtaaccaaactcttcggactgtgagccctgatgcctttttgccagccatactctttggcatccagtctctcgtggcgattgattatgcttgtgtgaggcaatcatggtggcatcacccataaagggaacacatttgacttttttttctcatattttaaattactacaagattattaaagataaaatgatttg

SEQ ID NO: 1403 - DNA, 536 bp, Homo sapiens
  misc_feature 213, 349, 510: n = A,T,C or G
gcctttgcaaagcttttatttcatgtctgcggcatggaatccacctgcacatggcatcttactggaaggaaaagcagtgcacgaaaaggaatgagtgggcggaaccaacggcctccacaagctgccttccagcagcctgccaaggccatggcaactgcaaacaaacacaagcaaacagagtctcttcacagctggagtctgaaagctcatagnggcatgtgtgaatctgacaaaattaaaagggcatagtccattacatgcataaaacactaataataatcctgtttacacgtgactgcagcaggcaggtccagctccaccactgccctcctgccacatcacatcaagngccatggtttaaagggtttttcatatgtaattcttttattctgtaaaaggtaacaaaatatacagaacaaaactttccctttttaaaactaatgttacaaatctgtattatcacttgtatataaatagtatatagctgatcattaataaggggtataagtncaatgtattctaaaactgttaagcca

SEQ ID NO: 1404 - DNA, 574 bp, Homo sapiens
tatcatttgtcagattgcttatgcccgtatagagggggatatgatagtctgcgcagcgtatgcacacgaactgccaaaatatggtgtgaaggttggcctgacaaattatgctgcagcatattgtactggcctgctgctggcccgcaggcttctcaataggtttggcatggacaagatctatgaaggccaagtggaggtgactggtgatgaatacaatgtggaaagcattgatggtcagccaggtgccttcacctgctatttggatgcaggccttgccagaactaccactggcaataaagtttttggtgccctgaagggagctgtggatggaggcttgtctatccctcacagtaccaaacgattccctggttatgattctgaaagcaaggaatttaatgcagaagtacatcggaagcacatcatgggccagaatgttgcagattacatgcgctacttaatggaagaagatgaagatgcttacaagaaacagttctctcaatacataaagaacagcgtaactccagacatgatggaggagatgtataagaaagctcatgctgctatacgagagaat

SEQ ID NO: 1405 - DNA, 601 bp, Homo sapiens
accttctagtcccgccatggccgctctcacccgggacccccagttccagaagctgcagcaatggtaccgcgagcaccgctccgagctgaacctgcgccgcctcttcgatgccaacaaggaccgcttcaaccacttcagcttgaccctcaacaccaaccatgggcatatcctggtggattactccaagaacctggtgacggaggacgtgatgcggatgctggtggacttggccaagtccaggggcgtggaggccgcccgggagcggatgttcaatggtgagaagatcaactacaccgagggtcgagccgtgctgcacgtggctctgcggaaccggtcaaacacacccatcctggtagacggcaaggatgtgatgccagaggtcaacaaggttctggacaagatgaagtctttctgccagcgtgtccggagcggtgactggaaggggtacacaggcaagaccatcacggacgtcatcaacattggcattggcggctccgacctgggacccctcatggtgactgaagcccttaagccatactcttcaggaggtccccgcgtctggtatgtctccaacattgatggaactcacattgccaaaacc

SEQ ID NO: 1406 - DNA, 601 bp, Homo sapiens
ccagcagccgtccggagccagccaacgagcggaaaatggcagacaatttttcgctccatgatgcgttatctgggtctggaaacccaaaccctcaaggatggcctggcgcatgggggaaccagcctgctggggcagggggctacccaggggcttcctatcctggggcctaccccgggcaggcacccccaggggcttatcctggacaggcacctccaggcgcctaccctggagcacctggagcttatcccggagcacctgcacctggagtctacccagggccacccagcggccctggggcctacccatcttctggacagccaagtgccaccggagcctaccctgccactggcccctatggcgcccctgctgggccactgattgtgccttataacctgcctttgcctgggggagtggtgcctcgcatgctgataacaattctgggcacggtgaagcccaatgcaaacagaattgctttagatttccaaagagggaatgatgttgccttccactttaacccacgcttcaatgagaacaacaggagagtcattgtttgcaatacaaagctggataataactggggaagggaagaaagacagtcggt

SEQ ID NO: 1407 - DNA, 584 bp, Homo sapiens
  misc_feature 62, 287, 553: n = A,T,C or G
aaattcatgcacttttactatgcccattgcacttctcatccatggatttgccttgccttaanaattaaccatggccttgtggcctgggtgacccaggctgcttttatcttgcacagctaaagagggtctgatgggtggctcaacaccccacccactcctataccatgtcatcagtgttcacattttccaaatgagttgaagtgccttgatctgtccactgccaccaccaccagtgctgagttttcccatgtggttttgcttttgtggtgttactgccttgctgctanagcagcaggactgtctgcgtagcgcctccagcctgggacctcactcagttcccagggtattcaaagacggcagcggctcccattccagtcccgatgcacatggacaccactccgtatgccctcttcccacggcgcttcagctcattgagcagcgtgatgacctgtcgtgccccagtgcagcccagtgggtgccctaaggccactgcaccccccagggggttcaccttctcaggggggagtcgtagcttctccacacaagtaggcancctggcttgcaaaggcctcattgatctcgaa

SEQ ID NO: 1408 - DNA, 601 bp, Homo sapiens
tgctaccacaatggtgtctactatgagccggagcagacagtcctcattgacaactgtcggcagcagtgcacgtgccatgtgggtaaagtcgtggtgtgccaggaacacagctgcaagccggggcaggtgtgccagccctccggaggcatcctgagctgcgtcaccaaagacccgtgccacggcgtgacatgccggccacaggagacatgcaaggagcagggtggccagggcgtgtgcctgcccaactatgaggccacgtgctggctgtggggcgacccacactaccactccttcgatggccggaagtttgacttccagggcacctgtaactatgtgctggcaacaactggctgcccgggggtcagcacccagggcctgacacccttcaccgtcaccaccaagaaccagaaccggggcaaccctgctgtgtcctacgtgagagtcgtcaccgtggctgccctcggcaccaacatctccatccacaaggacgagatcggcaaagtccgggtgaacggtgtgctcacagccttgcctgtctccgtggccgacgggcggatttcagtggcccagggtgcatcgaaggcactgctggtggctgact

SEQ ID NO: 1409 - DNA, 451 bp, Homo sapiens
ctcgcgcgcctgcaggtcgacactagtggatccaaagaattcggcacgaggtggctggtctgcagggttgacctgcgcaatgcagaggctgcaggtagtgctgggccacctgaggggtccggccgattccggctggatgccgcaggccgcgccttgcctgagcggtgccccgcaggcctcggccgcggacgtggtggtggtgcacgggcggcgcacggccatctgccgggcgggccgcggcggcttcaaggacaccacccccgacgagcttctctcggcagtcatgaccgcggttctcaaggacgtgaatctgaggccggaacagctgggggacatctgtgtcggaaatgtgctgcagcctggggccggggcaatcatggcccgaatcgcccagtttctgagtgacatcccggagactgtgcctttgtccactgtcaatagacagtgttcg

SEQ ID NO: 1410 - DNA, 451 bp, Homo sapiens
  misc_feature 30: n = A,T,C or G
agtggatccaaagaattcggcacgaggcanctttgatgacatgaacctctcggagtcccttctccgtggcatctacgcctatggttttgagaagccctctgccatccagcagcgagccattctaccttgtatcaagggttatgatgtgattgctcaagcccaatctgggactgggaaaacggccacatttgccatatcgattctgcagcagattgaattagatctaaaagccacccaggccttggtcctagcacccactcgagaattggctcagcagatacagaaggtggtcatggcactaggagactacatgggcgcctcctgtcacgcctgtatcgggggcaccaacgtgcgtgctgaggtgcagaaactgcagatggaagctccccacatcatcgtgggtacccctggccgtgtgtttgatatgcttaaccggagatacctgtccccc

SEQ ID NO: 1411 - DNA, 451 bp, Homo sapiens
  misc_feature 29: n = A,T,C or G
gtggatccaaagaattcggcacgagggtngggttcggaggcgcagaccacaaaagacagcactagtaagtcgcatccggagctgcagactccaaaagacagcactggcaaatcgggtgcggaggcgcagaccccagaagacagccccaacaggtcgggtgcggaggcaaagacccaaaaagacagccctagcaagtcaggttcggaggcgcagaccacaaaagatgtccctaataagtcgggtgcggacggccagaccccaaaagacggctccagcaagtcgggtgcggaggatcagaccccaaaagacgtccctaacaagtcgggtgcggagaagcagactccaaaagacggctctaacaagtccggtgcagaggagcagggcccaatagacgggcccagcaagtcgggtgcggaggagcagacctcaaaagacagccctaacaaggtgg

SEQ ID NO: 1412 - DNA, 451 bp, Homo sapiens
gtggatccaaagaattcggcacgagggaaaaggacttttaaccaccattttgtgacttacagaaaggaatttgaataaagaaaactatgatacttcaggcccatcttcactccctgtgtcttcttatgctttatttggcaactggatatggccaagaggggaagtttagtggacccctgaaacccatgacattttctatttatgaaggccaagaaccgagtcaaattatattccagtttaaggccaatcctcctgctgtgacttttgaactaactggggagacagacaacatatttgtgatagaacgggagggacttctgtattacaacagagccttggacagggaaacaagatctactcacaatctccaggttgcagccctggacgctaatggaattatagtggagggtccagtccctatcaccatagaagtgaaggacatcaacgacaa

SEQ ID NO: 1413 - DNA, 451 bp, Homo sapiens
  misc_feature 65, 71: n = A,T,C or G
gtggatccaaagaattcggcacgaggctttaccactgaatggaagaaaaggacttttaaccaccnttttgngacttacagaaaggaatttgaataaagaaaactatgatacttcaggcccatcttcactccctgtgtcttcttatgctttatttggcaactggatatggccaagaggggaagtttagtggacccctgaaacccatgacattttctatttatgaaggccaagaaccgagtcaaattatattccagtttaaggccaatcctcctgctgtgacttttgaactaactggggagacagacaacatatttgtgatagaacgggagggacttctgtattacaacagagccttggacagggaaacaagatctactcacaatctccaggttgcagccctggacgctaatggaattatagtggagggtccagtccctatcaccatagaagt

SEQ ID NO: 1414 - DNA, 360 bp, Homo sapiens
  misc_feature 28, 324, 337: n = A,T,C or G
tggatccaaagaattcggcacgaggggngcgactggagcggttccctcgcaggcggcgccattttgtgctaggagcctgataaaaccggcccggttctgtggaaagtgggcggcggagccagggtccctggaatggcggagactctgtcaggcctaggtgattctggagcggcgggcgcggcggctctgagctccgcctcgtcagagaccgggacgcggcgcctcagcgacctgcgagtgatcgatctgcgggcggagctgaggaaacggaatgtggactcgagcggcaacaagagcgttttgatggagcggcttaagaaggcnattgaagatgaangggggtaatcctggaccgaaatt

SEQ ID NO: 1415 - DNA, 451 bp, Homo sapiens
gtggatccaaagaattcggcacgaggcccaggggcttatcctggacaggcacctccaggcgcctaccctggagcacctggagcttatcccggagcacctgcacctggagtctacccagggccacccagcggccctggggcctacccatcttctggacagccaagtgccaccggagcctaccctgccactggcccctatggcgcccctgctgggccactgattgtgccttataacctgcctttgcctgggggagtggtgcctcgcatgctgataacaattctgggcacggtgaagcccaatgcaaacagaattgctttagatttccaaagagggaatgatgttgccttccactttaacccacgcttcaatgagaacaacaggagagtcattgtttgcaatacaaagctggataataactggggaagggaagaaagacagtcggttttcccat

SEQ ID NO: 1416 - DNA, 411 bp, Homo sapiens
aagttttagtgattctgctgagagagagcatagaaaaaaataagaaaaaaaaaaccaacctagtatctgttgttcagtagattgtaggtacttctgtttatagaaataataaggggaaaatgggtattttagaatgaggatacttttgtgttgtacctcttgcttctcttttatttgaataataaaggaaataacatcaaattaatgtttagcctactttagtatggatattgaagttaaaatgtcattcatttgcatttatttaggaaaagaagatatgcttcttaaacaaggtcagatgtatatggcagactcacagtgtacttccccaggtataccagcccatatgcaaagcagatctatgttaagacctctggaactatctttacccagtcaaacgtcatactctga

SEQ ID NO: 1417 - DNA, 411 bp, Homo sapiens
  misc_feature 6, 40: n = A,T,C or G
cggttntgccaggagatcctcggggtcccggccacgccantaaccaacatgcctgcaaccttcggccatctggcaggtggctacgacgcccagtactacgggtacctgtggagcgaggtgtattccatggacatgttccacacgcgcttcaagcaggagggtgtcctgaacagcaaggttggcatggattacagaagctgcatcctgagacccggcggttccgaggatgccagcgccatgctgaggcgcttcctgggccgtgaccccaagcaggacgccttcctcctgagcaaggggctgcaggtcgggggctgcgagcccgagccgcaggtctgctgaggcctggcactgcgactgcccagtctggcctgcgctcccgccgccctggtgccttagcccccggcacaggat

SEQ ID NO: 1418 - DNA, 2528 bp, Homo sapiens
gtgggaccgctgaccgcgcggctgctccgctctccccgctccaagcgccgatctgggcacccgccaccagcatggacgctcgccgcgtgccgcagaaagatctcagagtaaagaagaacttaaagaaattcagatatgtgaagttgatttccatggaaacctcgtcatcctctgatgacagttgtgacagctttgcttctgataattttgcaaacacgaggctgcagtcagttcgggaaggctgtaggacccgcagccagtgcaggcactctggacctctcagggtggcgatgaagtttccagcgcggagtaccaggggagcaaccaacaaaaaagcagagtcccgccagccctcagagaattctgtgactgattccaactccgattcagaagatgaaagtggaatgaattttttggagaaaagggctttaaatataaagcaaaacaaagcaatgcttgcaaaactcatgtctgaattagaaagcttccctggctcgttccgtggaagacatcccctcccaggctccgactcacaatcaaggagaccgcgaaggcgtacattcccgggtgttgcttccaggagaaaccctgaacggagagctcgtcctcttaccaggtcaaggtcccggatcctcgggtcccttgacgctctacccatggrgagagccagtttkgarkmtmwgtacatgttggtgagaaagaggaagaccgtggatggctacatgaatgaagatgacctgcccagaagccgtcgctccagatcatccgtgacccttccgcatataattcgcccagtggaagaaattacagaggaggagttggagaacgtctgcagcaattctcgagagaagatatataaccgttcactgggctctacttgtcatcaatgccgtcagaagactattgataccaaaacaaactgcagaaacccagactgctggggcgttcgaggccagttctgtggcccctgccttcgaaaccgttatggtgaagaggtcagggatgctctgctggatccgaactggcattgcccgccttgtcgaggaatctgcaactgcagtttctgccggcagcgagatggacggtgtgcgactggggtccttgtgtatttagccaaatatcatggctttgggaatgtgcatgcctacttgaaaagcctgaaacaggaatttgaaatgcaagcataatatctggaaaatttgctgcctgccttctacttctcaaatctttcttgtaaaagtttccaattttttcactgaaacctgagttaaaaatcttgatgatcagcctgtttcataagaaactccaatcaagttaatcttagcagacatgtgtttctggagcatcacagaaggtatattgctagttacactttgccctcctgcagtttcttctctgctcccaacccccatctcatagcatccccctctatttccaatgctcctctccaaccgcttagtttctgaatttcttttaaattacagttttatgaaagcatattttatttacttggtgttgaaatagccctcataaaacctaagcacttggaaacacaataatagtattaactaactagatctattgaatttcagagaagagccttctaacttgtttacacaaaaacgagtatgatttagcattcatactagttgaaatttttaatagaatcaaggcacaaaagtcttaaaaccatgtggaaaaattaggtaattattgcagattgatgtctctcaatcccatgtattgcgcttatgttacaagttgttgtcacagttgagacttaatttctcctaatttcttctgcccgaagggtaagtggtgcgtccagcttacacratcataattcaaaggttggtgggcaatgtaatacttaattaaaataatgatggaagagctatctggagattatgagtaagctgatttgaattttcagtataaaactttagtataattgtagtttgcaaagtttatttcagttcacatgtaaggtattgcaaataaattcttggacaattttgtatggaaacttgatattaaaaactagtctgtggttctttgcagtttcttgtaaatttataaaccaggcacaaggttcaagtttagattttaagcacttttataacaatgataagtgcctttttggagatgtaacttttagcagtttgttaacctgacatctctgccagtctagtttctgggcaggtttcctgtgtcagtattccccctcctctttgcattaatcaaggtatttggtagaggtggaatctaagtgtttgtatgtccaatttacttgcatatgtaaaccattgctgtgccattcaatgtttgatgcataattggaccttgaatcgataagtgtaaatacagcttttgatctgtaatgcttttatacaaaagtttattttaataataaaatgtttgttctaacttgtctgcttttttaaaaataatcttactgtacttaattctaattttttcctcatatttaaataaaaggccatttccaccttttctaaaaaaaaaaaaaa

SEQ ID NO: 1419 - DNA, 1760 bp, Homo sapiens
ctattggagtgagacgagcagcagcagctgtggaacccagcagctcccagaggtgctgcagtgccagccccagcattaccactgctaccatcagtcaagccaagcccagcagcctccagaaaaaaatgtagtgtatgagcgagtgaggacctacagtgggcccatgaacaaggtggtgcaggccttggaccccttcaactcacgggaagtgctctcccctctcaaaaccacctcctcctaccaaaatttggtttggagcgaccattctcaggaactccattctccaactttaaaaatatctacatgtgccccaagtactctacatataacccaaaatactgaacaggaacttcattctccaacagtgaaacttactacatatccacagaccactattaggaaatatgtagtacaaaatcctgaacaggaaccactgtctcaattcctaagaggaagccatttcttcccaggaaacaatgttatttatgaaaaaacaataagaaaagtggagaagctaaatactgatcaggggtgccatcctcaggctcaatgccatcatcacattatccaacagccccaggtcatccactctgcacactggcaacaacctgattctagccagcaaatccaagccatcacaggaaataatccaatttctacacatattggaaatgaactgtgccatagtggatcaagccagatttgtgagcaggtgataattcaggatgatggccctgaaaaattggaccccagatattttggagagttgcttgctgatctgagccgtaagaatacggatctatatcactgcttattagaacatttgcagagaattggaggaagcaaacaggactttgagtctacagatgagtcggaagacattgaatcattgattcctaaaggattatcagagtttacaaaacagcaaatacgctacattctgcagatgaggggtatgtctgataagtcactccgactagtgctgtccacatttagcaacatacgggaggagcttggacatcttcaaaatgatttgacatcactggaaaatgacaagatgagacttgagaaagatttatcattcaaagacactcaattaaaagagtacgaagaactcttggcatcagtgagagcaaataatcaccagcagcagcaaggacttcaagactcaagttcaaaatgccaggcattggaagaaaacaatctctctcttcgacatacactatcagacatggaatacagactaaaagaactggaatattgtaaacgtaatttagagcaagagaatcaaaaccttagaatgcaggtttctgagacttgcacaggcccaatgttgcaggctaaaatggatgagattggcaaccactacacggagatggtaaaaaacttgagaatggagaaagatagagagatctgcagactgaggtcccaattaaaccagtaccataaagatgtttcaaagagagaaggaagttgtagtgacttccaatttaagcttcatgaactgacaagcttgctggaagagaaggattccctcataaagcgtcagtcagaggaactctccaagttgcggcaagaaatatattcctctcataaccaaccctccactggtggaaggactactattaccactaaaaagtacaggacacaatatccaatcctaggcctcctatatgatgactacgaatatataccaccaggtagtgaaacacagactattgtgattgagaaaacagaagacaaatacacttgtccagaag

SEQ ID NO: 1420 - DNA, 757 bp, Homo sapiens
ctctgcagtgtgaggtatgacatactagtatataggatacttttagtactagctgacttaccttctgaggtttaactagagaaagaaatctctgtcttgtagtgtcaaatccatttaaataatacaagttattaactgtgaatacatctcctgataattaaatgcatatttatttaaatcacaattttaatggctacatagaaggccattatttggaaaccccattatttacttaaaaaattatttttttatttttaatttttttgtgttataataagtgctgcaaggcataattgcatgtaaatccttttctaccattctaattattgacttggaataaattattcaatataaaaatatttggttaaattataggaagttttaagaagttctttgttcattacttctaaattgttctcaagaaaatttatattcatttatagttcaacaaagagagtgtgaaacggccattcctctacccccaataatcattttcctttaattatacacttgtaatcttaatatgcatggagtataaagaaaaatatagagtaatttatgactagtatattcaacatctctctctctcctacataaataaaatcaattcagaattctatgttaaaaacacttattatttttattttttaattaaatataatattctgtcttattctaaaagagatttaaaatttgttgataaaatataaaataatcaacaagatacatttaaagtattactaaaaaaaaaaaaaaa

SEQ ID NO: 1421 - DNA, 2831 bp, Homo sapiens
aaaccccagctggaactccggccacagccagcatgcagggcgaagagagcctccggatcctggtggagcccgaaggggacagcttcccgctgatggagatcagcacctgtgagaccgaggcctccgagcagtgggactatgtcctcgtggcccaacgtcacacccagagagacccccggcaggcgcggcagcaacagttcctggaggagctcaggagaaagggcttccacattaaggtgatccgggaccagaaacaggtcttctttgggatccgtgctgacaacagtgtctttggcctgtaccgcactctcctcctggagcctgaggggcctgccccccacgccgagctggccgcgccgaccaccatcccggtcaccacgagtctcagaatccgaatcgtgaacttcgttgtcatgaacaacaagacctcggctggtgagaccttcgaggatctgatgaaggacggggtctttgaggccaggttccccctgcacaagggggagggacgcctgaagaagacgtgggcgcggtggagacacatgttccgggagcagccagttgatgaaatcaggaactactttggggaaaaggtggccctgtacttcgtctggctgggctggtacacctacatgctggtgccggccgccctgacgggcctcttagtctttctgagcggattctcgctgtttgaggccagccagatcagcaaggagatctgtgaggcccacgacatcctcatgtgtcccctcggcgaccacagccgcaggtaccagcggctctcggaaacctgcacttttgccaagctcacccacctctttgacaatgatggcacggtggtgttcgccatcttcatggctctctgggccacggtgttcctggagatctggaagcggcagcgcgcccgcgtggtcctgcactgggacctgtacgtgtgggacgaggaacaggaggaaatggcacttcagctcattaactgccccgactacaagctccggccataccagcactcctacctacgcagcaccgtcatcctcgtcctgaccctgctcatgatctgcctcatgatcggcatggcccacgtcctggtggtctaccgcgtcctggcctccgcgctcttcagcagctcggccgtgcccttcctggaggagcaggtgaccacggccgtggtggtgaccggggctctggtgcactatgtgaccatcgtcatcatgaccaagatcaacaggcgcgtggccctgaagctttgtgacttcgagatgcccaggaccttctcggagcgagagagcaggttcaccatccgcttcttcacactgcagttcttcacccatttctcgtctctcatctacatcgccttcatcctgggcaggatcaacggccaccccgggaagtccacgcgcctggcgggcttgtggaagctggaagagtgccacgccagcggctgcatgatggacctcttcgtgcagatggccatcatcatgggcctgaagcagacgctcagcaactgcgtcgagtacctggtcccgtgggtgacccacaagtgccgctctctgcgggcctccgagtccgggcacctgccccgggaccccgagctcagggactggcggcgcaactaccttctgaacccggtcaacaccttcagcctgttcgacgagttcatggagatgatgatccagtacggcttcaccaccatcttcgtggccgccttcccgctggcgccgctgctcgcgctcttcagcaacctcgtggagatccgcctggacgccatcaagatggtctggttgcagcggcgcctggtgccgcgcaaggccaaggacatcgggacctggctgcaggtgctggagaccatcggtgtgctggcggtcattgccaatgggatggtcattgccttcacatctgagttcatcccccgagtggtctacaagtaccgctatagcccatgcctgaaagaaggcaactctactgtcgactgcctcaagggctacgtcaaccacagcctgtccgtcttccacaccaaggacttccaggaccctgatgggattgagggctcagaaaacgtgactctgtgcagatacagggactaccgcaatccccccgattacaacttctccgagcagttctggttcctcctggccatccgcctggccttcgtcatcctctttgagcacgtggccttgtgcatcaagctcatcgccgcctggttcgtgcccgacatccctcagtcggtgaagaacaaggttctggaggtgaagtaccagaggctgcgtgagaagatgtggcatggaaggcagaggctgggtggggtgggggcaggctctcggcccccaatgcctgcccatcccaccccagcatccatcttcagtgccaggagcacagacgtgtagggccagagcccgtccagaggccaccaggagctgagacagtgccaccaccagcacctcccacaagcccaccgctgtgcgtgttgaggggtgctgtgagaaggctgtgcccatgtggggccgcaggaatcccctgtatgttcagggctgtgagctgccaccctattccgcctgctccgtctttgtgggggctctcaggcttggcacagccctgacttgaactctgggtgaccctgggcacccacagaactgggagtgagggctcctcaggcagccacaaggcaggaaaactggcgcaaatttcctgggcctccctctgacttctgggcgccagatcctgccgtgcccccatcctggctgttgggggtgtcctgagcccacctcgctggcctgttcccttcagccaacccgtttctgcagtaaaattaagcctgtcaaaaaaaaaaaaaaaaa

SEQ ID NO: 1422 - protein, 371 aa, Homo sapiens
  VARIANT 197,201,203,204: Xaa = Any amino acid
MDARRVPQKDLRVKKNLKKFRYVKLISMETSSSSDDSCDSFASDNFANTRLQSVREGCRTRSQCRHSGPLRVAMKFPARSTRGATNKKAESRQPSENSVTDSNSDSEDESGMNFLEKRALNIKQNKAMLAKLMSELESFPGSFRGRHPLPGSDSQSRRPRRRTFPGVASRRNPERRARPLTRSRSRILGSLDALPMXRASXEXXYMLVRKRKTVDGYMNEDDLPRSRRSRSSVTLPHIIRPVEEITEEELENVCSNSREKIYNRSLGSTCHQCRQKTIDTKTNCRNPDCWGVRGQFCGPCLRNRYGEEVRDALLDPNWHCPPCRGICNCSFCRQRDGRCATGVLVYLAKYHGFGNVHAYLKSLKQEFEMQA

SEQ ID NO: 1423 - protein, 532 aa, Homo sapiens
MNKVVQALDPFNSREVLSPLKTTSSYQNLVWSDHSQELHSPTLKISTCAPSTLHITQNTEQELHSPTVKLTTYPQTTIRKYVVQNPEQEPLSQFLRGSHFFPGNNVIYEKTIRKVEKLNTDQGCHPQAQCHHHIIQQPQVIHSAHWQQPDSSQQIQAITGNNPISTHIGNELCHSGSSQICEQVIIQDDGPEKLDPRYFGELLADLSRKNTDLYHCLLEHLQRIGGSKQDFESTDESEDIESLIPKGLSEFTKQQIRYILQMRGMSDKSLRLVLSTFSNIREELGHLQNDLTSLENDKMRLEKDLSFKDTQLKEYEELLASVRANNHQQQQGLQDSSSKCQALEENNLSLRHTLSDMEYRLKELEYCKRNLEQENQNLRMQVSETCTGPMLQAKMDEIGNHYTEMVKNLRMEKDREICRLRSQLNQYHKDVSKREGSCSDFQFKLHELTSLLEEKDSLIKRQSEELSKLRQEIYSSHNQPSTGGRTTITTKKYRTQYPILGLLYDDYEYIPPGSETQTIVIEKTEDKYTCPE

SEQ ID NO: 1424 - protein, 782 aa, Homo sapiens
MQGEESLRILVEPEGDSFPLMEISTCETEASEQWDYVLVAQRHTQRDPRQARQQQFLEELRRKGFHIKVIRDQKQVFFGIRADNSVFGLYRTLLLEPEGPAPHAELAAPTTIPVTTSLRIRIVNFVVMNNKTSAGETFEDLMKDGVFEARFPLHKGEGRLKKTWARWRHMFREQPVDEIRNYFGEKVALYFVWLGWYTYMLVPAALTGLLVFLSGFSLFEASQISKEICEAHDILMCPLGDHSRRYQRLSETCTFAKLTHLFDNDGTVVFAIFMALWATVFLEIWKRQRARVVLHWDLYVWDEEQEEMALQLINCPDYKLRPYQHSYLRSTVILVLTLLMICLMIGMAHVLVVYRVLASALFSSSAVPFLEEQVTTAVVVTGALVHYVTIVIMTKINRRVALKLCDFEMPRTFSERESRFTIRFFTLQFFTHFSSLIYIAFILGRINGHPGKSTRLAGLWKLEECHASGCMMDLFVQMAIIMGLKQTLSNCVEYLVPWVTHKCRSLRASESGHLPRDPELRDWRRNYLLNPVNTFSLFDEFMEMMIQYGFTTIFVAAFPLAPLLALFSNLVEIRLDAIKMVWLQRRLVPRKAKDIGTWLQVLETIGVLAVIANGMVIAFTSEFIPRVVYKYRYSPCLKEGNSTVDCLKGYVNHSLSVFHTKDFQDPDGIEGSENVTLCRYRDYRNPPDYNFSEQFWFLLAIRLAFVILFEHVALCIKLIAAWFVPDIPQSVKNKVLEVKYQRLREKMWHGRQRLGGVGAGSRPPMPAHPTPASIFSARSTDV

SEQ ID NO: 1425 - DNA, 3460 bp, Homo sapiens
  misc_feature 1017,2088,3437,3438: n = A,T,C or G
caggtctgaggcgaagctaggtgagccgtgggaagaaaagagggagcagctagggcgcgggtctccctcctcccggagtttggaacggctgaagttcaccttccagcccctagcgccgttcgcgccgctaggcctggcttctgaggcggttgcggtgctcggtcgccgcctaagcggggcagggtgcgaacaggggcttcgggccacgcttctcttggcgacaggattttgctgtgaagtccgtccgggaaacggaggaaaaaaagagttgcgggaggctgtctgctaataacggttcttgatacatatttgccagacttcaagatttcagaaaaggggtgaaagagaagattgcaactttgagtcagacctgtaggcctgatagactgattaaaccacagaaggtgacctgctgagaaaagtggtacaaatactgggaaaaacctgctcttctgcgttaagtgggagacaatgtcacaagttaaaagctcttattcctatgatgccccctcggatttcatcaatttttcatccttggatgatgaaggagatactcaaaacatagattcatggtttgaggagaaggccaatttggagaataagttactggggaagaatggaactggagggctttttcagggcaaaactcctttgagaaaggctaatcttcagcaagctattgtcacacctttgaaaccagttgacaacacttactacaaagaggcagaaaaagaaaatcttgtggaacaatccattccgtcaaatgcttgttcttccctggaagttgaggcagccatatcaagaaaaactccagcccagcctcagagaagatctcttaggctttctgctcagaaggatttggaacagaaagaaaagcatcatgtaaaaatgaaagccaagagatgtgccactcctgtaatcatcgatgaaattctaccctctaagaaaatgaaagtttctaacaacaaaaagaagccagaggaagaaggcagtgctcatcaagatactgctgaaaasaatgcatcttccccagagaaagccaagggtagacatactgtgccttgtatgccacctgcaaagcagaagtttctaaaaagtactgaggagcaagagctggagaagagtatgaaaatgcagcaagaggtggtggagatgcggaaaaagaatgaagaattcaagaaacttgctctggctggaatagggcaacctgtgaagaaatcagtgagccaggtcaccaaatcagttgacttccacttccgcacagatgagcgaatcaaacaacatcctaagaaccaggaggaatataaggaagtgaactttacatctgaactacgaaagcatccttcatctcctgcccgagtgactaagggatgtaccattgttaagcctttcaacctgtcccaaggaaagaaaagaacatttgatgaaacagtttctacatatgtgccccttgcacagcaagttgaagacttccataaacgaacccctaacagatatcatttgaggagcaagaaggatgatattaacctgttaccctccaaatcttctgtgaccaagatttgcagagacccacagactcctgtactgcaaaccaaacaccgtgcacgggctgtgacctgcaaaagtacagcagagctggaggctgaggagctcgagaaattgcaacaatacaaattcaaagcacgtgaacttgatcccagaatacttgaaggtgggcccatcttgcccaagaaaccacctgtgaaaccacccaccgagcctattggctttgatttggaaattgagaaaagaatccaggagcgagaatcaaagaagaaaacagaggatgaacactttgaatttcattccagaccttgccctactaagattttggaagatgttgtgggtgttcctgaaaagaaggtacttccaatcaccgtccccaagtcaccagcctttgcattgaagaacagaattcgaatgcccaccaaagaagatgaggaagaggacgaaccggtagtgataaaagctcaacctgtgccacattatggggtgccttttaagccccaaatcccagaggcaagaactgtggaaatatgccctttctcstttgattctcgagacaaagaacgtcagttacagaaggagaagaaaataaaagaactgcagaaaggggaggtgcccaagttcaaggcacttcccttgcctcattttgacaccattaacctgccagagaagaaggtaaagaatgtgacccagattgaacctttctgcttggagactgacagaagaggtgctctgaaggcacagacttggaagcaccagctggaagaagaactgagacagcagaaagaagcagcttgtttcaaggctcgtccaaacaccgtcatctctcaggagccctttgttcccaagaaagagaagaaatcagttgctgagggcctttctggttctctagttcaggaaccttttcagctggctactgagaagagagccaaagagcggcaggagctggagaagagaatggctgaggtagaagcccagaaagcccagcagttggaggaggccagactacaggaggaagagcagaaaaaagaggagctggccaggctacggagagaactggtgcataaggcaaatccaatacgcaagtaccagggtctggagataaagtcaagtgaccagcctctgactgtgcctgtatctcccaaattctccactcgattccactgctaaactcagctgtgagctgcggataccgcccggcaatgggacctgctcttaacctcaaacctaggaccgtcttgctttgtcattgggcatggagagaacccatttctccagacttttacctacccgtgcctgagaaagcatacttgacaactgtggactccagttttgttgagaattgttttcttacattactaaggctaataatgagatgtaactcatgaatgtctcgattagactccatgtagttacttcctttaaaccatcagccggccttttatatgggtcttcactctgactagaatttagtctctgtgtcagcacagtgtaatctctattgctattgccccttacgactctcaccctctccccactttttttaaaaattttaaccagaaaataaagatagttaaatcctaagatagagattaagtcatggtttaaatgaggaacaatcagtaaatcagattctgtcctcttctctgcataccgtgaatttatagttaaggatccctttgctgtgagggtagaaaacctcaccaactgcaccagtgaggaagaagactgcgtggattcatggggagcctcacagcagccacgcagcaggctctgggtggggctgccgttaaggcacagttctttccttactggtgctgataacaacagggaaccgtgcagtgtgcattttaagacctggcctggaataaatacgttttgtctttccctcmmaaaaaaaaaaaaaaaaaaaaaa

SEQ ID NO: 1426 - protein, 747 aa, Homo sapiens [sequence omitted]

SEQ ID NO: 1427 - DNA, 1290 bp, Homo sapiens
  misc_feature 450,478,484,1047: n = A,T,C or G
catggccagcaaaagaaagacctaggaagatcacatgggagaaaaagaaacatctgtaaagactgaatgcgtggcaggagtaatacctaataaaactgaagttttggaaaaaggaacatctgagatgctcacgtgtcctacaaaagaaacatctacaaaagcaagtacaaatgataagatgcccacatcagagtcaggacaaaaagaagatacgaaatcaccttcagtttctgaggtcacagctatggatgtggaagagataggaaaggcctcaccacttaagatagaagcagcagctgcatagtggtaacagcaatgagtggatgtcaaaagacagattcaactagcctatcaatattcttgggtgcagttccttctcatgaaagagcaagggaacttaaaaaaaatccctgtgaacaacttacagcaaaaatgaaacaaatgaaaaawaagcttcgtgtactacaaaaggaactawcagaascaaaagaaataaaatcatagagaatcaaaaagttaaaagagaacaagagctctgcagtgtgaggtatgacatactagtatataggatacttttagtactagctgacttaccttctgaggtttaactagagaaagaaatctctgtcttgtagtgtcaaatccatttaaataatacaagttattaactgtgaatacatctcctgataattaaatgcatatttatttaaatcacaattttaatggctacatagaaggccattatttggaaaccccattatttacttaaaaaattatttttttatttttaatttttttgtgttataataagtgctgcaaggcataattgcatgtaaatccttttctaccattctaattattgacttggaataaattattcaatataaaaatatttggttaaattataggaagttttaagaagttctttgttcattacttctaaattgttctcaagaaaatttatattcatttatagttcaacaaagagagtgtgaaacggccattcctctacccccaataatcattttcctttaattatacacttgwaatcttaatatgcatggagtataaagaaaaatatagagtaatttatgactagtatattcaacatctctctctctcctacataaataaaatcaattcagaattctatgttaaaaacacttattatttttattttttaattaaatataatattctgtcttattctaaaagagatttaaaatttgttgataaaatataaaataatcaacaagatacatttaaagtattactaaaaaaaaaaaaaaa

SEQ ID NO: 1428 - protein, 89 aa, Homo sapiens
MGEKETSVKTECVAGVIPNKTEVLEKGTSEMLTCPTKETSTKASTNDKMPTSESGQKEDTKSPSVSEVTAMDVEEIGKASPLKIEAAAA

SEQ ID NO: 1429 - protein, 62 aa, Homo sapiens
  VARIANT 45,55,57: Xaa = Any amino acid
MSGCQKTDSTSLSIFLGAVPSHERARELKKNPCEQLTAKMKQMKXKLRVLQKELXEXKEIKS

SEQ ID NO: 1430 - DNA, 483 bp, Homo sapiens
ttttgggcctgtttctgagcagcgcttcctttttgtccgacatcttgacgaggctgcggtgtctgctgctattctccgagcttcgcaatgccgcctaaggacgacaagaagaagaaggacgctggaaagtcggccaagaaagacaaagacccagtgaacaaatccgggggcaaggccaaaaagaagaagtggtccaaaggcaaagttcgggacaagctcaataacttagtcttgtttgacaaagctacctatgataaactctgtaaggaagttcccaactataaacttataaccccagctgtggtctctgagagactgaagattcgaggctccctggccagggcagcccttcaggagctccttagtaaaggacttatcaaactggtttcaaagcacagagctcaagtaatttacaccagaaataccaagggtggagatgctccagctgctggtgaagatgcatgaataggtccaaccagctgt

SEQ ID NO: 1431 - DNA, 430 bp, Homo sapiens
actatcatcccccaaggccttttacagtctgaaatatcaaaattgaaagcaaaaataggatgaccaaaggactactattttacctcttttcagaactctacaatagtagaaactaaattcccttatggatctcagggggaaataatgtgcctgttgaaggggctcagtgtttggtgtccaggctggcatttttcaggtgagggtttcatactgacaggaggcaggctcctaaaacaaggcggtagcaccagcaccatgactagggctgctttaaaacaaatttctaggacttacgctctttgggcctgatttgttaatgcttatgaggtaatgatattatgtttgagaagctctacttctagtatacctcaatgctcagagagaaagccaacaatacaatcaggaaaccacaatattgacaaaacttagt

SEQ ID NO: 1432 - DNA, 50 bp, Homo sapiens
  misc_feature 42: n = A,T,C or G
accgcggccgttaaacatgtgtcactgggcaggcggtgcctntaatactg

SEQ ID NO: 1433 - DNA, 167 bp, Homo sapiens
  misc_feature 71, 105, 111, 124, 134, 162: n = A,T,C or G
acaagcttttttttttttttttttttttttttttttttttttttttttaaggggaaaacccggtaatgatntcggggttgagggataggaggagaatgggggatnggtgtntgaacatgagggngttttctcgngtgaatgagggttttatgttgttaatgnggggg

SEQ ID NO: 1434 - DNA, 487 bp, Homo sapiens
acaggctgacagagaagattcccgagagtaaatcatctttccaatccagaggaacaagcatgtctctctgccaagatccatctaaactggagtgatgttagcagacccagcttagagttcttctttctttcttaagccctttgctctggaggaagttctccagcttcagctcaactcacagcttctccaagcatcaccctgggagtttcctgagggttttctcataaatgagggctgcacattgcctgttctgcttcgaagtattcaataccgctcagtattttaaatgaagtgattctaagatttggtttgggatcaataggaaagcatatgcagccaaccaagatgcaaatgttttgaaatgatatgaccaaaattttaagtaggaaagtcacccaaacacttctgctttcacttaagtgtctggcccgcaatactgtaggaacaagcatgatcttgttactgtgatattttaaatatccacagt

SEQ ID NO: 1435 - DNA, 383 bp, Homo sapiens
accctttaagatatccatctttttctttttaaccctaatctttcacttgaaagattttattgtataaaaagtttcacaggtcaataaacttagaggaaaatgagtatttggtccaaaaaaaggaaaaataatcaagattttagggcttttattttttcttttgtaattgtgtaaaaaatggaaaaaaacataaaaagcagaattttaatgtgaagacattttttgctataatcattagttttagaggcattgttagtttagtgtgtgtgcagagtccatttcccacatctttcctcaagtatcttctatttttatcatgaattcccttttaatcaactgtaggttatttaaaataaattcctacaacttaatggaaaaaaaaa

SEQ ID NO: 1436 - DNA, 514 bp, Homo sapiens
acagcattctggaataaagcaagagtgttcattcacacacacagtagcttcaaaactgttcgatctgtttgttcccatgtagttttctaaagatggaaaaaaaggactttggtcatcaagactactgtggccatattagattactggaacatctaagcatcagtgtgtgaccatgcgaacaaaagacttcggggagtgtctatttttaaaaaggtttatgtgtgtcgaggcagttgtaaaagatttactgcagaatcaagcccacttttaggcttaggaccaggttctaactatctaaaaatattgactgataacaaaagtgttctaaatgtggctattctgatccatagttgttttttaaagaaaaaaaatgtatatacagaaagagtataaaagtttgtgaatttaatgcaaattagcttccagtcttcacttcccaaatacttgatttatagttttgactcctttacatttttgccctcttaatttcaagatttgcaattttgccttcaaa

SEQ ID NO: 1437 - DNA, 176 bp, Homo sapiens
  misc_feature 53, 57, 119: n = A,T,C or G
acaagctttttttttttttttttttttttttttttcggggctgtgggtgaaanagtntgatggggtggtggttgtggtaaactttaatagtgtaggaagctgaataatttatgaagganaggggtcagggttgattcgggaggatcctattggtgcgggggctttgtatgattatg

SEQ ID NO: 1438 - DNA, 396 bp, Homo sapiens
ctcagatcttcgcaaatactgtggacaatgcccgcatcgttctgcagattgacaatgcccgtcttgctgctgatgactttagagtcaagtatgagacagagctggccatgcgccagtctgtggagaacgacatccatgggctccgcaaggtcattgatgacaccaatatcacacgactgcagctggagacagagatcgaggctctcaaggaggagctgctcttcatgaagaagaaccacgaagaggaagtaaaaggcctacaagcccagattgccagctctgggttgaccgtggaggtagatgcccccaaatctcaggacctcgccaagatcatggcagacatccgggcccaatatgacgagctggctcggaagaaccgagaggagctagacaagt

SEQ ID NO: 1439 - DNA, 442 bp, Homo sapiens
tcttcgaccccgccggaggaggagaccccattctataccaacacctattctgatttttcggtcaccctgaagtttatattcttatcctaccaggcttcggaataatctcccatattgtaacttactactccggaaaaaaagaaccatttggatacataggtatggtctgagctatgatatcaattggcttcctagggtttatcgtgtgagcacaccatatatttacagtaggaatagacgtagacacacgagcatatttcacctccgctaccataatcatcgctatccccaccggcgtcaaagtatttagctgactcgccacactccacggaagcaatatgaaatgatctgctgcagtgctctgagccctaggattcatctttcttttcaccgtaggtggcctgactggcattgtattagcaaactcatcactagacatcgt

SEQ ID NO: 1440 - DNA, 321 bp, Homo sapiens
  misc_feature 250, 251: n = A,T,C or G
acactgtcatagaattaggaatctgtatgtttactatgactaataagctcattaatcatttaatttgctatttctgcagttacctaaggcatgtctagatcacacaattaaaaattatcatatggtaactttccagactactatttaaatttccatatttttagaaggacaaaatgtatttggcagttcttccaataaattatatcttctgtataatcagtaatctgttaaagataaaactaataatttnnaaatttaaatgagagccaccacatgcttctttttgcacaaagaatgccaaaaggaaacataaaattgagt

SEQ ID NO: 1441 - DNA, 180 bp, Homo sapiens
  misc_feature 34, 73: n = A,T,C or G
acaagctttttttttttttttttttttttttagnttttatacatttttttcttttttctttttttttgtttgncttttattgaatcttttatggaatcccccttttttcattttcattttttttgcatagggaacaaataaacaaaataatgacagccagagtcactttctgtaaatggt

SEQ ID NO: 1442 - DNA, 492 bp, Homo sapiens
cggccgaggtaccacatcttaaatactctccagtgttctgagtctattatgggaggagcagtctttgagacgctggaaggaaatacaattgagataggatgtgacggtgacagtataacagtaaatggaatcaaaatggtgaacaaaaaggatattgtgacaaataatggtgtgatccatttgattgatcaggtcctaattcctgattctgccaaacaagttattgagctggctggaaaacagcaaaccaccttcacggatcttgtggcccaattaggcttggcatctgctctgaggccagatggagaatacactttgctggcacctgtgaataatgcattttctgatgatactctcagcatggatcagcgcctccttaaattaattctgcagaatcacatattgaaagtaaaagttggccttaatgagctttacaacgggcaaatactggaaaccatcggaggcaaacagctcagagtcttcgtatatcgt

SEQ ID NO: 1443 - DNA, 550 bp, Homo sapiens
  misc_feature 397, 420: n = A,T,C or G
acaagcttttttttttttttttttttttttgagcgtgtaaaatatgttttattgttctttaaaagggttcagggtttggttttaaatcaggctgcacacctttcaaatcaatctgacatctctctatgtcaaactggcttcagctagcaatacttcattaaatcgaaaagaaaaaaattgctttaaggaaaaaaaatccagttttaagaacaattaacattagtctttaaaataaaaggagggctaatgtttcatgttgctttatacatccttctcctcaatacagaaccaggaatgtaattttcctaactcaggcaggcactgatactgatggacactgcgcgtgcacacacacacacacacatacacacacacacacacacacacacacaccccnttcccccaaacaacaaaattcanagtatgtcaaaggaaaaaggtttgttattgtattgatcaaaacccagtggaatcaacaccatctatcttagcttaacaggtatgctgttttgatcttgagtctatattaatggaatctattgttgcattc

SEQ ID NO: 1444 - DNA, 522 bp, Homo sapiens
acctctagatcaacctgggaacagtcacaagggagtgtgacttcttggccataataaactcacttgatagtgtttatgttattaatctgaatgcaacagaagacaaaagcacaggcatgcacacacacagaaccccaaaccactaaaaactacctaaacactgacttagtaaatagtaaaaaggtaatgttgggacttttaaaccttgaatccattagccagacttgggatgaaaggaccatctaaaatcatgctagtctaaaccatgctcttccacacagctgtttaaaaaccactgggtatgaggaatatgctagaaagaaatgttaaaaatagattgttggctcacacttatttttctaataaataggaccattattactaccaggaaagtcttatttattttgcctgaaattggcttaaagaaagtctcatgacgggatgggatgggctgcgcttctcaatgaactctgaggcagaaatatttgccttggattctgtggattctttaaacctgtgtgc

SEQ ID NO: 1445 - DNA, 440 bp, Homo sapiens
actgcgatgaggggactttagaagaggtgtcaaggctgggacttcaggaacatgtgattaggctgtattcaaagcagatcaccattgcgatcaacgtcctccatgagcatggcatagtccaccgtgacattaaaggtgccaatatcttccttacctcatctggattaatcaaactgggagattttggatgttcagtaaagctcaaaaacaatgcccagaccatgcctggtgaagtgaacagcaccctggggacagcagcatacatggcacctgaagtcatcactcgtgccaaaggagagggccatgggcgtgcggccgacatctggagtctggggtgtgttgtcatagagatggtgactggcaagaggccttggcatgagtatgagcacaactttcaaattatgtataaagtggggatgggacataagccaccaatccct

SEQ ID NO: 1446 - DNA, 481 bp, Homo sapiens
  misc_feature 451: n = A,T,C or G
acaagagatggaaggccgagcagagccatgacgactcgagctccgaggattccgacgcggaaacagatggccaagcctcggggggcagtgattctggggactggatcttcacaatccgagaaaaagatcccaagaatctcgagaatggagctcttcagccatcggacttggacagaaataagatgaaagacatcccaaagaggcctttctctcagtgtttatctacaattatttctcctctgtttgtagagttgaaggagaagagccaggcgtgcggagggaacttggggtccattgaagagctgcgaggggccatctacctagcggaggaggcgtgccctggcatctccgacaccatggtggcccagctcgtgcagcggctccagagatactctctaagtggtggaggaacttcatcccactgaaattcctttggcatttggggttttgnttttctttttttccttcttcatcctcctcc

SEQ ID NO: 1447 - DNA, 111 bp, Homo sapiens
acatgaaattgcacttaaccaaaactattgtgtaaaacaaattttaattcctcagggttttaatttaaactagtatttttttagattatttgttttaggtgatttaatggt

SEQ ID NO: 1448 - DNA, 469 bp, Homo sapiens
gccagcaggagaatcctcccctgccccttggctcaaaggtggtggttctggcggggctgttcgtgatggtgttgatcctcttcctgggagcctccatggtctacctgatccgggtggcacggaggaaccaggagcgtgccctgcgcaccgtctggagctccggagatgacaaggagcagctggtgaagaacacatatgtcctgtgaccgccctgtcgccaagaggactggggaagggaggggagactatgtgtgagctttttttaaatagagggattgactcggatttgagtgatcattagggctgaggtctgtttctctgggaggtaggacggctgcttcctggtctggcagggatgggtttgctttggaaatcctctaggaggctcctcctcgcatggcctgcagtctggcagcagccccgagttgtttcctcgctgatcgatttctttcctccaggtagagttttc

SEQ ID NO: 1449 - DNA, 178 bp, Homo sapiens
acttccaatttataatgaatactttcttagattttaggtaagaggggagcagaggaattatgaactggggtaaacccattttgaatattagcattgccaatatcctgtattcttgttttacatttggattagaaatttaacatagtaattcttaagtcttttgtctgatttttaaagt

SEQ ID NO: 1450 - DNA, 316 bp, Homo sapiens
acaggttgagtcaaatgaggtcatgggtgcaccagatgacaggaccagaactccccttgagccatccaactgttggagtgacttagatggtgggaaccacacagagaatgtgggagaggcagcagtgactcaggttgaagagcaggcaggcacagtggcctcgtgtcctttagggcatagtgatgacacagtttatcatgatgacaaatgtatggtagaggtcccccaagagttagagacaagcacagggcatagtttagagaaagaattcaccaaccaggaagcagctgagcccaaggaggttccagcgcacagt

SEQ ID NO: 1451 - DNA, 339 bp, Homo sapiens
  misc_feature 334: n = A,T,C or G
actgatggagaggtagagactcaggtatacaaccaggattctcaagattccattggagaaggagttacccagggagattatacacctatggaagacagtgaagaaacctctcagtctctacaaatagatcttgggccacttcaatcagatcagcagacgacaacttcatcccaggatggtcaaggcaaaggagatgatgtcattgtaattgacagtgatgatgaagaagaggatgatgatgaaaatgatggagaacatgaggattatgaagaggatgaggaagatgatgatgatgatgaagatgacacagggatgggagatgagggtgaagatngtaat

SEQ ID NO: 1452 - DNA, 312 bp, Homo sapiens
  misc_feature 219, 223, 290, 301, 305: n = A,T,C or G
acttataaagacatttttttcttttgttaacgttattagcatatctttgtgctttattatcctggtgacagttaccgttctatgtaggctgtgacttgcgctgcttttttagagcacttggcaaatcagaaatgcttctagctgtatttgtatgcacttattttaaaaagaaaaaaaaagccaaatacattttctgacattgtaagattgccttactgnctgncattccttattgctggcccctttctcaggccggaggccaagtggtggagaaggaaaggaaatgatcnaacgggcatgnaganaagtggg

SEQ ID NO: 1453 - DNA, 492 bp, Homo sapiens
acaacagcggtggtggccctgatacgagggaagcagttgattgtagccaacgcaggagactctcgctgtgtggtatctgaggctggcaaagctttagacatgtcccatgatcacaaaccagaggatgaagtagaactagcacgcatcaagaatgctggtggcaaggtcaccatggatgggcgagtcaacgggggcctcaacctctccagagccattggggaccacttctataagagaaacaagaacctgccacctgaggaacagatgatttcagcccttcctgacatcaaggtgctgactctcactgacgaccatgaattcatggtcattgcctgtgatggcatctggaatgtgatgagcagccaggaagttgtagatttcattcaatcaaagatcagccagcgtgatgaaaatggggagcttcggttattgtcatccattgtggaagagctgctggatcagtgcctggcaccagacacttctggggatggt

SEQ ID NO: 1454 - DNA, 332 bp, Homo sapiens
acatttttaatctgttatagttggcggcagtattaaaatggtgagtaaagagcccaggtttgctcctgtttgtaactagtcttttctggaaatactgtcttctgtttccttttgcctttgcagaatgtgctttagcctttgtctgagaatgggtttaggtagaagggtttcctgaaagtctagtcttttggtgtaatagtattgttgaaccttaggttttatgttatatctgcatatgagtgatatgtgatcatgattcattttgcagatttacattttgcttgtgtggaaagttacgttcacttcaacctacagacccttttgtataatgt

SEQ ID NO: 1455 - DNA, 461 bp, Homo sapiens
actggaatttttttgttcgtttgtttttaagacggagtgtcaactctcgcccaggctggggtgcagtggcctgatctcggctcactgcaaccttctcctcccaggctgaagtgattctcctgcctcagcctcgcaagtagctgggactgcaggcatgtgccaccactcctggctaattatttgtatttttagtagagagagggtttcaccgtgttagccatgatggtctcattctcctgaccttgtgatccacccacctcggcctcccaaagtgctgggattacaggcgtgagccactgtgcccaccctggtatttttttttaaattggccacttaagagttgtccttcagaaagtggagcagcagtgtgattagtaaaaacgatgggctttcctgcagctctggcttatggtctttgtttttccagttaacagctgttacttcatgctgttatagggggt

SEQ ID NO: 1456 - DNA, 457 bp, Homo sapiens
actaagtcacacccagccagtcaataactgagaaatcaaaataaaatgataatttcaaagaattacataaatacagggccttttgagatttttggcaattgtaaacaaaaacgaatggtttttacaattcagtgtaattctacgaatatttatttggcacccatgttaggcactgaggctacacagcagtgaaataggcctagttgttctcaactagagaacatagttggttaatgtagctgcactgaattgtagctgtttagaagataatataccctgaggctttttaaagtatactattactataagaagtaaaattattttatacttataaattttgttttggattattcaactgaatttggagtgttcagaattttcatggcggttgagacaaggaagaggtataatgctatttttttttccttttctttttttttttgagatggagtctcac

SEQ ID NO: 1457 - DNA, 487 bp, Homo sapiens
  misc_feature 470: n = A,T,C or G
acttggtggggacggaggagctagggactaactgttgctcttggtgggcttggcagggactaggctgaagatgtgtcttctccccgccacctactgtatgacaccacattcttcctaacagctggggttgtgaggaatatgaaaagagcctattcgatagctagaagggaatatgaaaggtagaagtgacttcaaggtcacgaggttcccctcccacctctgtcacaggcttcttgactacgtagttggagctatttcttcccccagcaaagccagagagctttgtccccggcctcctggacacataggccattatcctgtattcctttggcttggcatcttttagctcaggaaggtagaagagatctgtgcccatgggtctccttgcttcaatcccttcttgtttcagtgacatatgtattgtttatctgggttagggatgggggacagataatagaacgagcaaagtnacctatacaggccagca

SEQ ID NO: 1458 - DNA, 527 bp, Homo sapiens
  misc_feature 477, 515, 517, 518, 519, 524: n = A,T,C or G
gtttaaaaataactagaaaaactcaggcccatccattttctcagatctccttgaaaattgaggccttttcgatagtttcgggtcaggtaaaaatggcctcctggcgtaagcttttcaaggtttttggaggctttttgtaaattgtgataggaactttggaccttgaacttacgtatcatgtggagaagagccaatttaacaaactaggaagatgaaaagggaaattgtggccaaagctttgggaaaaggaggttcttaaaatcagtgtttcccctttgtgcacttgtagaaaaaaaagaaaaccttctagagctgatttgatggacaatggagagagctttccctgtgattataaaaaaggaagctagctgctctacggtcatctttgcttagagtatactttaacctggcttttaaagcagtagtaactgccccaccaaaggtcttaaaagccatttttggagcctattgcactgngttctcctactgcaaatattttcatatgggaggatggntnnntcttnatg

SEQ ID NO: 1459 - DNA, 108 bp, Homo sapiens
  misc_feature 80, 82, 89: n = A,T,C or G
acaagctttttttttttttttttttttttttttttttttttttttttttttttttttttttttttttttttttttttttnanaaaaaantttttttatttgaataagg

SEQ ID NO: 1460 - DNA, 489 bp, Homo sapiens
  misc_feature 460: n = A,T,C or G
acctgggttcctgtctcttgcataaaggttataaatcatcaccagaccagtttgtcggcatctttgctcagaataggccagagtggatcatctccgaattggcttgttacacgtacaagttctctgttactatgacttaaatgaacaaaccagagttgtttggttgagtatggaagttatgtaagttaacttatgccacaccagatgtctggtcagaattgcaatagaaagaggtgcagagtgggctagaggagacaaatggagaaagcaactaaccatagcctaatttcaaaggccatttcagattcttcttagcactctctctccctctcctgggccgggtgctatgtgtttctctctctagccccctctccctaacacttagtgttagcaactaagtgacaagatgaaaaagataaactagaagcaagttctggcaataacattttaaaagccactnacactggctacagcaaataattgtaaaga

SEQ ID NO: 1461 - DNA, 350 bp, Homo sapiens
  misc_feature 350: n = A,T,C or G
acggccagggctattggttgaatgagtaggctgatggtttcgataataactagtatggggataaggggtgtaggtgtgccttgtggtaagaagtgggctagggcatttttaatcttagagcgaaagcctataatcactgcgcccgctcataaggggatggccatggctaggtttatagatagttgggttttggtgggaagaggagagagggatggtttgtgctgtcaaccctggaggccctggaggctggggtgcaggcttaccaaatttagcaaatgaaaattgtagatgcctggttacttttgaaattcggataaacaacagttttttttttttttattttagtctan

SEQ ID NO: 1462 - DNA, 383 bp, Homo sapiens
acagaactcagaggaaaaaagaaattaaattttagctttctggagagcagcccctctctggcaccatcaaacacttctttgtttcccctcaacttggaactcttcaaacatcaggggttgtgagggtttggccattcttttatcttgggtccatgtgagtgacagaaatggtgcggcctgggaaagatctccctcctttacattttctcttctccctcctcctccttattctaaaactgtgcctccaacagaggggcaggggctcttgtagagagatccctggcccaggacaggagatgccaaatctaatttatctcactgagggcctttgagaaaaacgcttctgggccaggctcagtggctcatgcctatataatcccagt

SEQ ID NO: 1463 - DNA, 372 bp, Homo sapiens
  misc_feature 107, 130, 274, 303, 354, 370: n = A,T,C or G
acaagctttttttttttttttttttttttttttgaaaaagtcatggaggccatggggttggcttgaaaccagctttggggggttcgattccttccttttttgtctanattttatgtatacgggttcttcnaatgtgtggtagggtggggggcatccatatagtcactccaggtttatggagggttcttctactattaggacttttcgctttgaagcgaaggcttctcaaatcatgaaaattattaatattactgctgttagagaaatgaatgancctacagatgataggatgtttcatgtggngtatgcatcggggtagtccgagtaacgtcggggcattccggataggccganaaagtgttgtgggaanaa

SEQ ID NO: 1464 - DNA, 465 bp, Homo sapiens
gttctggtaaaaagctggaagatggccctaaattcttgaagtctggtgatgctgccattgttgatatggttcctggcaagcccatgtgtgttgagagcttctcagactatccacctttgggtcgctttgctgttcgtgatatgagacagacagttgcggtgggtgtcatcaaagcagtggacaagaaggctgctggagctggcaaggtcaccaagtctgcccagaaagctcagaaggctaaatgaatattatccctaatacctgccaccccactcttaatcagtggtggaagaacggtctcagaactgtttgtttcaattggccatttaagtttagtagtaaaagactggttaatgataacaatgcatcgtaaaaccttcagaaggaaaggagaatgttttgtggaccactttggttttcttttttgcgtgtggcagttttaagttattagtttttaaaatcagt

SEQ ID NO: 1465 - DNA, 545 bp, Homo sapiens
  misc_feature 471: n = A,T,C or G
actgaaagcatttctactaggaaagtattgccaatgtccattgctagacataatatagcaggaacaacacatttaggtgctgaaaaagatgttgatgttagtgaagattcacctcctcccctacctgaaagaactcctgaatcgtttgtgttagcaagtgaacataatacacctgtaagatcggaatggagtgaacttcaaagtcaggaacgatctgaacaaaaaaagtctgaaggcttgataacctctgaaaatgagaaatctgatcatccagcgggaggtattcactatgaaatgtgcatagaatgtccacctactttcagtgacaagagagaacaaatatcagaaaatccaacagaagccacagatattggttttggtaatcgatgtggaaaacccaaaggaccaagagatccaccttcagaatggacatgattcagggagctagaagacactttaagttatactggnaaattcaggtgccactgaaagccagatttatagtattccatctttaatatgtgggactaacagcagtgtagatt

SEQ ID NO: 1466 - DNA, 270 bp, Homo sapiens
actgattttaaaaactaataacttaaaactgccacacgcaaaaaagaaaaccaaagtggtccacaaaacattctcctttccttctgaaggttttacgatgcattgttatcattaaccagtcttttactactaaacttaaatgaccaattgaaacaaacagttctgagaccgttcttccaccactgattaagagtggggtggcaggtattagggataatattcatttagccttctgagctttctgggcagacttggtgaccttgccagctc

SEQ ID NO: 1467 - DNA, 357 bp, Homo sapiens
accattcagttcagctgcaggtataggcagtgacaagtatctaattcttagaagaatcacttactcccacaatctgtccagacacattaatctaaggacaagtttataaatagcaaacgtgattttcacattgcagtgttctcaagaatgtatatacaagtgtgtagtcctgttgatgggatgtttccccgagttctttctattgatgcgttcatgctcttgaccctggtagagacagttctttctttccacagagcagattttcttttgtcatccaccatttacaatactctgtgaattagtattacttattacatttatgaaacggcaatatttggattgtaatagctcttcagt

SEQ ID NO: 1468 - DNA, 390 bp, Homo sapiens
acccatctgctgaaagcccaataatgtggctaaatccagggctgttgggggctgtgatgtggctactctcttatgatgctggtaggagtagaagttaacatgacctttcagaaggaaaattggctaaatgtgaaaaaagcaataaaagtgggaatacgccttcatccatttattctagttctaagaaccccgagcaaagaataacatatgaagatttttgtcatcatattatttatagtggcaaaaatttggcagtgaaataatgaccaatagagaggcatggtcaataccttaggctatgtctatataatgaagtattatacgacccttaggaatcatgtttttgcagcatatttaatggcaggatttaaatttgttggagaaatttgt

SEQ ID NO: 1469 - DNA, 93 bp, Homo sapiens
tctccctataccgagacccaccatccttccatcctgaggaccgccccaaccctcggagccccccactcagtaggtctgaaggcctccatttgt

SEQ ID NO: 1470 - DNA, 427 bp, Homo sapiens
actccatcagcttcacaaggtgggcatggtgattctgcggcccgtggtcggtgtccctgtccagcgggttgcccaccttcatcttccgcacctcttctaccactctccgcacgaactcatcatgaatggagtcctccacaaagagtcggcctgctgcaatgcaattctctcctttgttgaagaaaacagaactcatccccatctgcacagccttgttgaggtcacagtcagcaaagatgatgaggggtgacttcccgcccagttccagggacaccttcttcacgttacttatgacacagcttttcatgatgtgcttgcccacctctgtggagcctgtgaacccgattttcctcacatcaggatggtctgagagtctctggccgaccagggagccagatcctgggaggacgttaaccacacctttggg

SEQ ID NO: 1471 - DNA, 411 bp, Homo sapiens
acttggaaggaaaagaccagctcgggggttggtttcagtcatccttattaacaagtgtggcagcaaggaagagagcaccttataagacagtgattgttcatggatttacccttggagaaaagggagaaaagatgtccaagtctcttgggaatgtcattcatcctgatgttgtcgttaatggaggacaagatcaaagcaaagagcctccgtatggtgctgatgtccttcgctggtgggtagctgattccaatgtcttcaccgaagttgcaattggcccatccgtgctcaatgctgccagagatgatattagcaagcttaggaatacacttcactttcttttgggaaatgtggctgatttcaacccagaaacagattccatccctgtaaacgatatgtatgtcatagaccagt

SEQ ID NO: 1472 - DNA, 581 bp, Homo sapiens
  misc_feature 572: n = A,T,C or G
acaaggtattagtgataacacaacattcagcttcctaagagttaaaacgtgctgcttacatgaagggagatgatactgagctaagaagtcctggtatagggaagcagagagaccaacctacttcatattatttataaaatagagaatattctcagctaacatgctgggagaaaaaattcttccaaaaaggcagaattacaatcaatgccaagatttacaaattccatcatgtttaaatataaggacaaaaataaacatttcttatttaaaaaaaacccacaaatttccccaactatagcttatctgttagcacttctttatcagtctgactattctttaaaggccttaaaacatgaatttgggataaaaacaaataaaagtgcccaagttttaagaagccatatgttaacttaggatgttatctatatattttttagaccaatcaatgttttttaagaggtgtagatactggtaacttttctctttaaataaatgtttatatatttcaccaacaacactggcctgtggcacacagcatgtttaataaaaacacattgctattaaaaaaagtntatgtaaac

SEQ ID NO: 1473 - DNA, 337 bp, Homo sapiens
acaagggcgggacgtgtgctgtggcagccccgtttgacaccgtgcacatccccgaagccaccaagcaggtggtgaaggccttccaggagttcatccggtgaggacctgtgacggggctcccgggaagtcctatgcggtgtgggagcagagggtggtgatcctgccccgggaattctggagtgcctgccatttcagccagatgaaggaaggtgtggccagaggagagagcagggggactgcttgcccagttgtgggcacttgggccagctcgtgattcccacaggtccactccacactcggcatacgacccagagacgtacctcggcgcgaccacgct

SEQ ID NO: 1474 - DNA, 250 bp, Homo sapiens
  misc_feature 212: n = A,T,C or G
accatggggacaggaggtcacagaacacacacacacacacacacacacacacacacacgtgcacacacacatccccccacaactacagccgccaaaataaccagcatggtgttgtaacatccccccagtgggggctagaattccccatggtgacctgtgacctgctccctgagacaggggaggccaggcaggtcacggtggggacgcagcanaacattatttctccatcttgctgtttcctagccttgag

SEQ ID NO: 1475 - DNA, 513 bp, Homo sapiens
acagtttatgtctcagatacttctatgtatacataagaaccactcagggggaaaaaaaaagatttccccctccagctccctgaatttctgaaagttgtctgacccataaaatgttaaaatatttcatttttatataaaatatctacaaaaatagataacatttacaaaaaccagacagtatttccagttttccttagtaaccgttaacgcagtccccttcctcttttttttcttctcagaacgttgccatctccagcaaagagcgcttgaacagctgggcatttctagaaaggtctgtcacttggtgcaccatttcctgcagggccgtggtgctggggtaatggagggcggccatcttggttgccatgactatagtcttgagctgctcgcagagctggttgctggagttcatgactttgttgcgaatgtcctgggcagtcacctgccgtgtcagcgtgtctccaatgaacaccagtttgtgtgcactgaggatgacaaacttgctgtgtgcca

SEQ ID NO: 1476 - DNA, 247 bp, Homo sapiens
actacagtatacttggttgatttaggttgcacattcactgaattcactgagattattcctataattttaaagtatcatttatttgaaaaacatacattatcaacatgtttttgatatttgataatgaaaaaaatctttgcttgtttatttctgaaaaagaactgtatttagtgattattttagatagtgatattatagcattcatctgtgtgtaaattatttcatatagggaagagttctgatctgt

SEQ ID NO: 1477 - DNA, 567 bp, Homo sapiens
  misc_feature 559: n = A,T,C or G
actttcaaaataatatgacatcttaattgtggttcttgtgcattcttttgaagacaatatttgcttattcatgtagtgagtgacagacaagattctagagtatgatgattattaattcgtgcatgatgaaaaatattagatattattggtagctgattagtcagttttcacaggtattagattatcacatgttcaatgaggaactacattaatgataactaaggtagaaaattcagaataacacttaaacacttaatgacaaaaatcttacaccaatacagttaatttgagaatcactgcaataacatgttcaaaaaatccatgattagtgcattaacctcaccgatgactgaataagacttattcaatgatggaaacggaaatgttattgtaaattccctggctttactgcatttccttgtatttcacaactctcacactcagtttctgtttttctgtgttagtgaagtctgttttgtggtgttttgttttcattcatagttgcaacagaaaggcttttcaagaaaacatcaagaaaaaaaaagtattagctcagttncctacctg

SEQ ID NO: 1478 - DNA, 465 bp, Homo sapiens
acatggctaatcttcccaaaaactagctcattaaagatgaaatagactagctctcttcagtgaagaggacaaatagtttatttaaagcatttgttccaataaaataaatagagggaaacttggatgctaaaattacatgaataggaatcttcctggcacttagtgtttctatgttattgaaaaatgatgttccagaaagattacttttttcctcttatttttactgccattgtcgacctattgtgggacatttttatatattgaatctgggttcttttttgactttttttttcccaatccaacagcatccttttttttaaaagagagaattagaaaatattaaatcctgcatgtaatatatctgctgtcatcttagttggaccaacttcccatttatttatcttaaaactatacagttacatcttaattccatccaaagaagatacagtttgaagacagaagtgt

SEQ ID NO: 1479 - DNA, 174 bp, Homo sapiens
acaggatttgtttatagaagtgcaggcattctgtattgaattcagtaggatacgagaagctgctggtcttttccggttgttgaagacattggatactggggaaacaccttctgagaccaaaatgtcaaaataatacctcatcagaaccatcccatccattcactgttcagctgt

SEQ ID NO: 1480 - DNA, 168 bp, Homo sapiens
  misc_feature 115, 125, 129: n = A,T,C or G
acaagctttttttttttttttttttttttttttttttttcttttttttttttttttttttttttttttttttttttttttttttttttttgggctctaaagggggtaaggggggngctaaagggnaaanacgggccctatttaaaaaatttttaggggaaataatttt

SEQ ID NO: 1481 - DNA, 362 bp, Homo sapiens
acaagttacttctggctttctctcgtcttgtggctgttcttcattttccatctttccttggtttgaagccattccttcattttcactgtagagtttttccatgtcgagatttcccctccttttcctgtcctgcggggattctggacaggttgctcctccttttcaggcttcgcagagcgctgggaacaacagacgcgcagacccgttccccttccgccattccagtgttccgctggcagcgtggaaggcccgcacactgacctggaagaagctggaccaagaattaggagcccaggaaccggagcagacgagacccagccgcggggacagggggcaggcactcggaccggtgcctacatctg

SEQ ID NO: 1482 - DNA, 478 bp, Homo sapiens
acacaatggtttattaaaggaatgtatggcccacatcaacctagcaaggattctactggcaaaccttcctatggccaaaggaaaaacaagcaggagttgagtggctggggtggggtgcaggcaatggagagagggcagaagggtgtagaagctgaaggggtctagaagcttactcctgagtttcttccttctgtcttcaaatctttacttcttatggccaaagacccagctgtttcataggctggagatgcactcttctagactgctcgagacagccagagacaggggaggagggaagaaggatactgtggaaagggatggcggggcaaacatttagagctagaagccactactgggccaatgctaaagtttctgtctctaagcctaaaaaagccagtgtagtagggcccttatcactcttagtttgctaggtttcccctctgaaataatgagcagatttagccaggctagcagaaag

SEQ ID NO: 1483 - DNA, 503 bp, Homo sapiens
acagttggacctgctggcattcgaggccctcagggtcaccaaggccctgctggcccccctggtccccctggccctcctggacctccaggtgtaagcggtggtggttatgactttggttacgatggagacttctacagggctgaccagcctcgctcagcaccttctctcagacccaaggactatgaagttgatgctactctgaagtctctcaacaaccagattgagacccttcttactcctgaaggctctagaaagaacccagctcgcacatgccgtgacttgagactcagccacccagagtggagcagtggttactactggattgaccctaaccaaggatgcactatggatgctatcaaagtatactgtgatttctctactggcgaaacctgtatccgggcccaacctgaaaacatcccagccaagaactggtataggagctccaaggacaagaaacacgtctggctaggagaaactatcaatgctggcagccagtttgaata

SEQ ID NO: 1484 - DNA, 108 bp, Homo sapiens
actctgtgtgctggtgggtgttggggttggggtcaccgtagtggtggtggtgattggtgtcggagttgggttctctgtggtggtggttgtcatggtggtgggttgggt

SEQ ID NO: 1485 - DNA, 161 bp, Homo sapiens
acattcagaaagtctgaagagagtaaggctcagcaaggggagggctccagagggctcaaagtgccatcccctgcaggagggtgcagggggataaagggctattaatccgtttctcaggaacacgaggcagggaagagcttaaggcaaccagccttctctgg

SEQ ID NO: 1486 - DNA, 589 bp, Homo sapiens
  misc_feature 538: n = A,T,C or G
acggtaactgactccagggtcactcatactgtgtccgtggtaacggtaagtctgcagctccatcaggatgggccccttcccagatctacaataggcagcagcaaaccttgttgcctctcggacgcacaggatatccattccatccactctcagcccaggaatgaaatcgcctctcttgtagtaatcagtgctggctgccgctctctcaacagacgttcccattccatagcgattattctcacagatgaaaatacaaggtaatttccacaaagctgccatgttgtaagcttcgaatatctggccctggttagcagcaccatcgccatataaagtcaggcagacctcatcttttccattatacttacaggctagagcaatcccagcgcccaggggcacctgcgctcccacgatgccattgcccccgtagaagttcttggcatacatgtgcatcgatcctcctttccctttagcacaacctccttttcgtcctgtaagctctgcgagaatttctcggacggaaaggccccgggtgaaagtnaagccgtgagcccggtaggctgtgatgagatggtctgtggggttgatgccg

SEQ ID NO: 1487 - DNA, 198 bp, Homo sapiens
  misc_feature 197: n = A,T,C or G
acaaatagattcttataatattatttaaatgactgcatttttaaatacaaggctttatatttttaactttaagatgtttttatgtgctctccaaattttttttactgtttctgattgtatggaaatataaaagtaaatatgaaacatttaaaatataatttgttgtcaaagcaaaaaaaaaaaaaaaaaaaaaaaang

SEQ ID NO: 1488 - DNA, 444 bp, Homo sapiens
acaccgttttgatggaagaggacattgtagacacgaagtaactggagatggccttcagaatcagctgagctgctgtctgctttggaaaaccgttcctgccgctgccgatggatggaaatgcaatggatttcagcttcttatcatcagccagggccaagcagtttttcactgtcttttccagaagttcttcacacttgtctgcaccccaaactggactattacagtggatcacaaacttggcaggcaggccatggcctgcgctgacagcagctccagctacttccaagggcccgttctttttccggagttccaggacagcttccacaaactccttgccacctttcttctccagcgtgtttcctaggtcatctttaaggtcaatgtcagcattggtaggattgattatggcctccacctcaaagccggctaaattactgatttcac

SEQ ID NO: 1489 - DNA, 510 bp, Homo sapiens
cgctgaggaggatcggcggccggtgagggggaagcaagtctggtctctgtgattgaagaagtcggctctgggctccagtgcgggaatcacacacatacctcagaatgccgggtctaagttgtagattttatcaacacaaatttcctgaggtggaagatgtagtgatggtgaatgtcagatccattgctgaaatgggggcttatgtcagcttgctggaatacaacaacattgaaggcatgattcttcttagtgaattatccagaaggcgtatccgttctatcaacaaactcatccgaattggcaggaatgagtgtgtggttgtcattagggtggacaaagaaaaaggatatattgatttgtcaaaaagaagagtttctccagaggaagcaatcaaatgtgaagacaaattcacaaaatccaaaactgtttatagcattcttcgtcatgttgctgaggtgttagaatacaccaaggatgagcagctggaaagcctattccagaggactgcct

SEQ ID NO: 1490 - DNA, 246 bp, Homo sapiens
tgacgcgacctcagttgtcctgccctgtggaatgggctcaaggttcctgagacacccgattcctgcccaaacagctgtatttatataagtctgttatttattattaatttattggggtgaccttcttggggactcgggggctggtctgatggaactgtgtatttatttaaaactctggtgataaaaataaagctgtctgaactgttaaaaaaaaaaacaaaaaaaaaaaaaaaaaaaaaagcttgt

SEQ ID NO: 1491 - DNA, 470 bp, Homo sapiens
ctgaattcagttgctttgcccaagataggagttctctgatgcagaaattattgggctcttttagggtaagaagtttgtgtctttgtctggccacatcttgactaggtattgtctactctgaagacctttaatggcttccctctttcatctcctgagtatgtaacttgcaatgggcagctatccagtgacttgttctgagtaagtgtgttcattaatgtttatttagctctgaagcaagagtgatatactccaggacttagaatagtgcctaaagtgctgcagccaaagacagagcggaactatgaaaagtgggcttggagatggcaggagagcttgtcattgagcctggcaatttagcaaactgatgctgaggatgattgaggtgggtctacctcatctctgaaaattctggaaggaatggaggagtctcaacatgtgtttctgacacaagatccgtggtttgtaccggc

SEQ ID NO: 1492 - DNA, 313 bp, Homo sapiens
acatatattttaccttttatacctatgttcgattttgttttgttttgttttgttctggctttgaggcttgttttgttgtctgtgtctgtctgaataacctgcgtgtctaaaaccacgtgaaatgtgaatgattattggcaatattaccttgacagaatcatgggactttgagaagagggaggacagaggcctctgtcgcactaacgctctcgtggttgctcgactgttgtatctgtgatacattatccgactaaggactctgggctggcagggccttctgccgggaaagctagaaacactaggttcttcctgt

SEQ ID NO: 1493 - DNA, 539 bp, Homo sapiens
actagaacaatccaccagagtaatgcaaattacatgagacataaatgtcacagaaaaaaagtaaaagataagggaatacatggtttactccagtcatagttcaacttcttaacaaaatgtgagtattccctttggatatgtctgaaatgtaagtatgttttttgcactaagacagccttctataatcatgtgataatgaaatcataatgacaaagttcatcttcccacagtttttgctggccaatctctctaacctcagcctaggtaatttggtggcttgccctcaacatttccttaactagaataaacatagagaaatagaattagtaataatccttttacataaataccaaaaatcatggcataacaactccccaaaaaggaaaggtataaaagaaatggatgaggagaaagctaataaagaaaagtaggcaagatgtctcagattctccctggggtagatcttctcagggcgataaagaaaacgtcttcccaaaaaacccctttagacagaatctgaggtggcttaaaatagctgc

SEQ ID NO: 1494 - DNA, 221 bp, Homo sapiens
acagattaacttaacacaaaaacccgaacatcaaaatgaaggtgtgtggaggaaaggtgctgctgggtctccctacaactgttcatttctttgtggggcagggggtagttcctaaatggctgtggtccaatgactaatgtaaaacaaaaacagaaacaaaaaaaacaaggaactgtcatttccacgaaagcacagcggcagtgattctagcaggcctcagg

SEQ ID NO: 1495 - DNA, 213 bp, Homo sapiens
  misc_feature 183: n = A,T,C or G
actcttaaagtataaaatataaggtaaggtaaatttcatgcatctttttatgaagaccacctattttatatttcaaattaaataattttaaagttgctggcctaatgagcaatgttctcaattttcgttttcattttgctgtattgagacctataaataaatgtatatttttttttgcataanaaaaaaaaaaaaaaaaaaaaaaaagcttgt

SEQ ID NO: 1496 - DNA, 433 bp, Homo sapiens
  misc_feature 48, 228, 247, 285, 292, 304, 323, 393, 395, 425: n = A,T,C or G
gtacaagcttttttttttttttttttttttttttttttgctgtcccanatttattgaaaataatacagcactacagaaaaaattcaaacaggtccccgaggcgttttgaaattcatcccaactgtaggctgagtgacctgaaggttggacagactgccgaagtccaaaagcttcagcatttccttagtgtcaggatctacttcaataatctcctgatccaaggctganacctcaggaacataattgnctctcctttctctctcctcctcctgcagcttgatgganatacctnttactgggcctntctgaattcgcttcatcanatgcgtgacgtaacctgctatcttgttgcggagctttttgctggggataatggcgatctcctcgcacacncncttgttcgtgtggaagtcgttgcccaggcncgtgtagt

SEQ ID NO: 1497 - DNA, 478 bp, Homo sapiens
acacaaagagggggtgggtgtcggatgcagagtgtgtggcctgatgctccacggcgtgcaggacggggggctaatagtaggtttccttctccacccagccgccagggcgtcgcctgatgatgagttttctgacttcgtcatatacgaagatgagaagagagtaggggaaggcacagaaccaccaggtaggtttgaggggatacatcctaagagcaacacccattccagggcagtaggaaaggaaagcagccagggctgtctcttcaaagaggccaaatatcaagatcttgttcttcatcccctgctggaagaccgaattcctcctggtcttacagatgaccaagtcggcccactgcaccaccacgatactgacgaagaaggctgtgtggcaggtgaactccacgattttcctctgctcataggtccactgctgcccgtagctgtcttccacatcgttgatccagcggtcatcccagtc

SEQ ID NO: 1498 - DNA, 316 bp, Homo sapiens
ggattccactgagccaccctacagccagaagagatatgaggaaattgttaaggaagtcagcacttacattaagaaaattggctacaaccccgacacagtagcatttgtgccaatttctggttggaatggtgacaacatgctggagccaagtgctaacatgccttggttcaagggatggaaagtcacccgtaaggatggcaatgccagtggaaccacgctgcttgaggctctggactgcatcctaccaccaactcgtccaactgacaagcccttgcgcctgcctctccaggatgtctacaaaattggtggtattggt

SEQ ID NO: 1499 - DNA, 445 bp, Homo sapiens
catgaccacagtccatgccatcactgccacccagaagactgtggatggcccctccgggaaactgtggcgtgatggccgcggggctctccagaacatcatccctgcctctactggcgctgccaaggctgtgggcaaggtcatccctgagctgaacgggaagctcactggcatggccttccgtgtccccactgccaacgtgtcagtggtggacctgacctgccgtctagaaaaacctgccaaatatgatgacatcaagaaggtggtgaagcaggcgtcggagggccccctcaagggcatcctgggctacactgagcaccaggtggtctcctctgacttcaacagcgacacccactcctccacctttgacgctggggctggcattgccctcaacgaccactttgtcaagctcatttcctggtatgacaacgaatttggctacagcaac

SEQ ID NO: 1500 - DNA, 457 bp, Homo sapiens
  misc_feature 28, 29: n = A,T,C or G
tttttttttttttttttttttttggcgnngttttatttaaaatgttattgtctctgattagaaaatacagtcatgagggctaaaaactgaaatgatgtgaaaaggcatccattaagcagtgttgccccaccaccctctccatcagtcttgtctcatggggatggggaaaatgaagacagaacgctttgccttgctttgcaatccctcctttgaaggccttctgtcccaggaagccaatgttcatttgatgtggaagagggacctgtgtttaaccagaagctgtcctccctcatccctttcccatggcttacacgcagaagggagaggagatgaccagaggagaaatcaggggaagaaaaggcaacaggggaggcaaagggaaaggagaggaatgcttaaaatatacagtgaaatttgagtaggattctctactcaaagacttctctgggaagtgtcc

SEQ ID NO: 1501 - DNA, 115 bp, Homo sapiens
acactggtgttggacagagcagcttggcttttcatgtgcccacctacttacctactacctgcgactttctttttccttgttctagctgactcttcatgcccctaagattttaagt

SEQ ID NO: 1502 - DNA, 477 bp, Homo sapiens
acccagatcaggaaaattaatggtttcagttgcctttatcttcatcagagatatctggagtgttgtgctcattttagaaagctttgttttaagaaggacttaaaaaactggagccattgcaagaggaaggtggttgggatggggctaaatcagaggattctgtaaatgaggaatggttaaagcaactggatttgtttagcctagagaggaaaaaaagtgttggatttttggagacctataaaatagtttccactgtaggcagaaatttatttcatgctattccataagaagaagatgtaagttgtaggtgaagtatttaactccatataaagattttgagctggctgcataaatccattgccttcccaggtagggagcccctatctttgcagctgaaagaaatctctgtgatgaaaaagccatgtggctgttccaggcatcactttccagtgggcagatttctgtttgtttgatact

SEQ ID NO: 1503 - DNA, 508 bp, Homo sapiens
gcaatggggccatttaagagttctgtgttcatcttgattcttcaccttctagaaggggccctgagtaattcactcattcagctgaacaacaatggctatgaaggcattgtcgttgcaatcgaccccaatgtgccagaagatgaaacactcattcaacaaataaaggacatggtgacccaggcatctctgtatctgtttgaagctacaggaaagcgattttatttcaaaaatgttgccattttgattcctgaaacatggaagacaaaggctgactatgtgagaccaaaacttgagacctacaaaaatgctgatgttctggttgctgagtctactcctccaggtaatgatgaaccctacactgagcagatgggcaactgtggagagaagggtgaaaggatccacctcactcctgatttcattgcaggaaaaaagttagctgaatatggaccacaaggtagggcatttgtccatgagtgggctcatctacgatggggagtatttgacgagt

SEQ ID NO: 1504 - DNA, 569 bp, Homo sapiens
  misc_feature 484: n = A,T,C or G
acagcattctggaataaagcaagagtgttcattcacacacacagtagcttcaaaactgttcgatctgtttgttcccatgtagttttctaaagatggaaaaaaaggactttggtcatcaagactactgtggccatattagattactggaacatctaagcatcagtgtgtgaccatgcgaacaaaagacttcggggagtgtctatttttaaaaaggtttatgtgtgtcgaggcagttgtaaaagatttactgcagaatcaagcccacttttaggcttaggaccaggttctaactatctaaaaatattgactgataacaaaaagtgttctaaatgtggctattctgatccatagttgttttttaaagaaaaaaaatgtatatacagaaagagtataaaagtttgtgaatttaatgcaaattagcttccagtcttcacttcccaaatacttgatttatagttttgactcctttacatttttgccttcntaatttcaagatttgcaattttgccttcaaaacagatcatttttttaaattgtaaaaagtattcaacatatgcagaaataaaagc

SEQ ID NO: 1505 - DNA, 502 bp, Homo sapiens
  misc_feature 492: n = A,T,C or G
acagcattctggaataaagcaagagtgttcattcacacacacagtagcttcaaaactgttcgatctgtttgttcccatgtagttttctaaagatggaaaaaaaggactttggtcatcaagactactgtggccatattagattactggaacatctaagcatcagtgtgtgaccatgcgaacaaaagacttcggggagtgtctatttttaaaaaggtttatgtgtgtcgaggcagttgtaaaagatttactgcagaatcaagcccacttttaggcttaggaccaggttctaactatctaaaaatattgactgataacaaaaagtgttctaaatgtggctattctgatccatagttgttttttaaagaaaaaaaatgtatatacagaaagagtataaaagtttgtgaatttaatgcaaattagcttccagtcttcacttcccaaatacttgatttatagttttgactcctttacatttttgccttcttaatttcnagatttgcaa

SEQ ID NO: 1506 - DNA, 368 bp, Homo sapiens
taaaaatgaagcctaagccctggtctaaacgctgggaacgtccaaattttaatattaaaggaatcagatttgatctttgtttaactgaacagcaaatgaaagaagctcagaagtggaatcagccatggcttgaatttgatatgatgagggaatatgatacttcaaaaattgaagctgcaatatggaaggaaattgaagcgtcgaaaaggtcttgattctgagaatgaatttggttagttgcagaagatacattggctctaagaggatatattttgagaccaatttaatttcatttataagaacatagtaattaagtgaactaagcattcattgttttattaatactttttttctaaaataaaacttgt

SEQ ID NO: 1507 - DNA, 223 bp, Homo sapiens
accttaatcattggtttatcacattggattcaaattcaggttccttttttgataaagaggaaatttgttttccatgcttgtgattttgtgtttgtaaacatttcaggaggaatttaggagtgtaactatagtttatacttctataatgttgtcttacatttacatttttaagtgcctaattgttaaaactgatttatgtttctcttctaaagaggatatgtgt

SEQ ID NO: 1508 - DNA, 356 bp, Homo sapiens
actttcatgccagtataggaaacctcaatcttttttttttttcgcctttaagaaggttttcagtgattatacctcaggtatttctgagtgtcctattgtctaataggagaaatatcttcccgagctcagaattaaaagttctcctaaattatgaagatcccaaatcttatgtaaataaccttaggcatgagtccttagggagaagttaatgaccattgttaaagtgcttttttagaaaatgttgtgctgtatgttcttgatttgacataaatgaatagactttggcaagggaggaaataagttaaaaggcagcttacaagagcctattccctataaagggtataattttacacagt

SEQ ID NO: 1509 - DNA, 402 bp, Homo sapiens
acaatagatttttgaagtttcaggtaactggaaaaatctttaacttttgctttaagtgtttggggcaggataaaacaacatagaaaatataaaacaatttttgctttgaaaaatacagtgcaggtgaccatttactgcttattctgtaatccttactgtctataattaacttcagtaacactgaaacttgatgaaaagttttaaaaaattatttactgtagggacaaagttatatggaatgtttgttattttctatactatctgaatgcactgccagtgaagactgtaaagacagaacacactattttggagggaggatactaattgtttaaaatttttcatcatttgtgagtgataaaaagtttgtatagtttttataataaatccctattttgaaaaaaa

SEQ ID NO: 1510 - DNA, 196 bp, Homo sapiens
acaaaatatatatttaaaaacctcaacacaaccaagcatcttgcaaaggcccaggaaagcaagggtttggccagtcagggatgaggatggggcccgagggtctaaagaaggcactagagggacagggaccgctttgggtctcacccagtcaagttcacagtctgccctcttagtgtgaggaaatggggcttgaggt

SEQ ID NO: 1511 - DNA, 405 bp, Homo sapiens
ctcttccacccctgccaggcccagcagccaccacagcgcctgcttcctcggccctgaaatcatgcccctaggtctcctgtggctgggcctagccctgttgggggctctgcatgcccaggcccaggactccacctcagacctgatcccagccccacctctgagcaaggtccctctgcagcagaacttccaggacaaccaattccaggggaagtggtatgtggtaggcctggcagggaatgcaattctcagagaagacaaagactcgcaaaagatgtatgccaccatctatgagctgaaagaagacaagagctacaatgtcacctccgtcctgtttaggaaaaagaagtgtgactactggatcaggacttttgttccaggttgccagcccggcgagttcacgctggg

SEQ ID NO: 1512 - DNA, 214 bp, Homo sapiens
ccgccgcagacgccgccgcgatgcgctacgtcgcctcctacctgctggctgccctagggggcaactcctcccccagcgccaaggacatcaagaagatcttggacagcgtgggtatcgaggcggacgacgaccggctcaacaaggttatcagtgagctgaatggaaaaaacattgaagacgtcattgcccagggtattggcaagcttgccagtgc

SEQ ID NO: 1513 - DNA, 264 bp, Homo sapiens
ggggtgctggtttgcgtcgtagtctcctgcagcgtctggggtttccgttgcagtcctcggaaccagaacctcggcgtggcctagcgagttatggcgacgaaggccgtgtgcgtgctgaagggcgacggcccagtgcagggcatcatcaatttcgagcagaaggaaagtaatggaccagtgaaggtgtggggaagcattaaaggactgactgaaggcctgcatggattccatgttcatgagtttggagataatacagcaggctgt

SEQ ID NO: 1514 - DNA, 531 bp, Homo sapiens
  misc_feature 487, 509: n = A,T,C or G
acctctgctatttgctgttattttatctgctatgctattgaagttttggcaattgactatagtgtgagccaggaatcactggctgttaatctttcaaagtgtcttgaattgtaggtgactattatatttccaagaaatattccttaagatattaactgagaaggctgtggatttaatgtggaaatgatgtttcataagaattctgttgatggaaatacactgttatcttcacttttataagaaataggaaatattttaatgtttcttggggaatgtgttagagaatttccttactcttgattgtgggatactatttaattatttcactttagaaagctgagtgtttcacaccttatctatgtagaatatatttccttattcagaatttctaaaagtttaagttctatgagggctaatatcttatcttcctataattttagacattctttatctttttagtatggcaaactgccatcatttacttttnaactttgattttatatgctatntattaagtattttattaggagt

SEQ ID NO: 1515 - DNA, 146 bp, Homo sapiens
actacagcagtcaaagagatctccactagagatcagaaagaagcaccactattttcttctatgacgtgtatgtgttggtcatgagcatgctagtatgaataaggcaatgtgttaagcactggcatacaaatgcagctaaaggtgcc

SEQ ID NO: 1516 - DNA, 413 bp, Homo sapiens
actcatagattgtgtaggcgttggtcttctgatagcaactttaatgtggttcatctctaacaagtatttagtgaaacgacagagcagagactatgatgtggaatggggctatgcttttgatgtgcatctcaatgctttttatccactcctggtcattttgcattttatccagctttttttcatcaaccatgttatcctgacagacacatttattggatatttagttggaaataccttatggttggttgcagttggctattatatctatgtaactttcctgggatacagtgcattgccatttttgaaaaatacagtaattcttctgtatccatttgcacctctgattctgctctacgggctttccctggcactgggatggaacttcactcatactctctgttctttctataagt

SEQ ID NO: 1517 - DNA, 405 bp, Homo sapiens
acaacttgaacgtatctgagaagtctgtcaggccctcaaattctgctacattttctagttcacaattatatatcttgagcttggaatagcctttctgaatatactgtccgcatttttcatgttcccctgaggaagcataaaatttactccaccagtccacgatttcttcctccttctctgtcagcttagaagccagtaatggtttggtgtcttccatttcgataacgatgtcccggcatggtggggcagacagaagggaggctttgagctgtgggacgatgtcctctttccctgcataagggtcacagcgaaagcggtccaggcgctcgatggtgcactggccgacgacaggcttccgcccaaactgcctgtggtcgatgaccttgatcaccagtgggggcatgt

SEQ ID NO: 1518 - DNA, 358 bp, Homo sapiens
acgttttgccaacctatgaaatggccgtgaaaatgcctgaaaaagaaccaccacctccttacttacctgcctgaagaaattctgcctttgacaataaatcctataccagctttttgtttgtttatgttacagaatgctgcaattcagggctcttcaaacttgtttgatataaaatatgttgtcttttgtttaagcatttattttcaaacactaaggagctttttgacatctgttaaacgtctttttgtttttttgttaagtcttttacattttaatagtttttgaagacaatctaggttaagcaagagcaaagtgccattgtttgcctttaattggggggtgggaagggaaagagggt

SEQ ID NO: 1519 - DNA, 515 bp, Homo sapiens
accatctgatgctgaagttttgattagtgatattttctactactacatacttagagttcactggttcagtcttaaatgcctgcatggtgcctttttaggataaggtataaccatacatttttggtggaagtgtttctgggttagggaagttaaagtctgtttatccgtaagtggggaggagggtcagctaagagaagtgggagggccagagctttttggttctgatttacaaattaatgaagtagtttcaaacaacgcggtcatgtttacctctccatttgggagcctgcctacattcttgttctagaagcacaaaaaatcctcagatgaattagaagaaagaggtttggggactcagcggatactagttcttttaccttctgcttggtaacttagattaaactgagcattgtttttctgtcacaaatgttttccttatgacactggtttcgacatgtaaaatgtgtttgaaaacctgctttgtagatgcagagagaagctacaggaaacccagt

SEQ ID NO: 1520 - DNA, 319 bp, Homo sapiens
cacagctcgtctcttgccttagtgtgctgctgtgagagtcacagtggaaactgcagggaggaggtgtgttcctaagaaccaaaatccagcacagcatcctgtgaagccacgtgtaatgatggtcccataaggaaagtatgtgaatatggctcttgtaaaggattaactattgtaattttagcttatgctctgtattctgttttctatggaattatttaagcccttttagtgacctttgtcctggcccatttaaaaactaaaatgtagtatatattgtataaaatggaaatatcattattgcttcattaggggaaactgt

SEQ ID NO: 1521 - DNA, 368 bp, Homo sapiens
actttggaattgtcccatattaatcagagatggcaaaagaaaaagttctcatattaccaggttgattttgtgtctcatttcaaattttaatttaaaattatggttttcatttttgtttaccttaaagtgatgcttaaaagtggcatgtaattaggacacttaggcttgttgaaagcattttcgacatttgtataaaagaatttgtgataaatatatccaggtgctcaccaaagaaacatgtattaacaacttaaattagatttttctaactgatagttttcactcatttataatcagtaggagagactgtctagatgttggggcagctctatgatttaagtctgtaacatgttataactgaatttagt

SEQ ID NO: 1522 - DNA, 508 bp, Homo sapiens
  misc_feature 458, 492: n = A,T,C or G
accttccattcccaccacacagactctgggcctccccgcaaaatggctccagaattagagtaattatgagatggtgggaaccagagcaactcaggtgcatgatacaaggagaggttgtcatctgggtagggcagagaggagggcttgctcatctgaacaggggtgtatttcattccaggccctcagtctttggcaatggccaccctggtgttggcatattggccccactgtaacttttgggggcttcccggtctagccacaccctcggatggaaagacttgactgcataaagatgtcagttctccctgagttgattgataggcttaatggtcaccctaaaaacacccacatatgcttttcgatggaaccaggtaagttgacgctaaagttcttatggaaaaatacacacgcaatagctaggaaaacacagggaaagaagagttctgagcagggcctantcttagccaatattaaaacatactatgaagcctntgatacttaaacagca

SEQ ID NO: 1523 - DNA, 73 bp, Homo sapiens
cggcgctcccctaggcatctggggagcgggtgagcggggtgggcacagcccccttcactgccctcgacagctt

SEQ ID NO: 1524 - DNA, 512 bp, Homo sapiens
actttaatagctcaaactcagagtcatcgtgctcccaattccaaagagattcctaaaagaggcaacttcggccgtttgagaagccagcgctcacccacccggggtctctgtgcattgacctttgggtgctgacttggagaaaagcacaaacacgaccagtcccatcctggctcccgtggggcttcttctatctacgcattgtatcgactgcattagttggactaagatgatgactcagttaaaggaggagacaaatgctgactgtctaagcaagaatggcccaagctggcaagaaaaagcacactgcatacataggatacagaagggcagagcttctgcctgcggatctgcaacattacatttgttttgcctgcaaactatcaagaaggattctgttggccagggagtctccactgaacaaacaaaatggcagtcaaaagtcttgagtgtcctattccagcagcccagagtcctcatccgtcatccacgggagagtctttgagggaaacatg

SEQ ID NO: 1525 - DNA, 370 bp, Homo sapiens
  misc_feature 95, 101, 183, 308, 357: n = A,T,C or G
acaagctttttttttttttttttttttttttttggagttttttacaactcaggtgagttttagctttattggggagggggtgatctaaaacactntttacnccggcttctattgacttgggttaatcgtgtgaccgcggtggctggcacgaaattgaccaaccctggggttagtatagcttanttaaactttcgtttattgctaaaggttaatcactgctgtttcccgtgggggtgtggctaggctaagcgttttgagctgcattgctgcgtgcttgatgcttgtcccttttgatcgtggtgatttanagggtgaactcactggaacggggatgcttgcatgtgtaatcttactaanagctaatagaaag

SEQ ID NO: 1526 - DNA, 156 bp, Homo sapiens
  misc_feature 43, 45, 82, 84, 114, 124, 145, 150: n = A,T,C or G
gtacaagcttttttttttttttttttttttttttttttttttngnacaagcttttttttttttttttttttttttaccaacngnaaacagttacttttattttgagtaaaaatncacattcatntcattttcccttatatccctnaaatnttaaat

SEQ ID NO: 1527 - DNA, 289 bp, Homo sapiens
accttgacttaaatccaagagcaaaagttaagactctcctcctctatttttggtaaacaactgcatggtaaacttagatgactcttccccctggattttacctgggagtggcctttttacatttttatttaaaagagggcaggtttggcacttttatactgatgtcaccaatgttaatatttcttgggatctcaggaagattcatattctttacagctgatacagcacgggctggagctcctgctaagccagcctgtatacagaagcaaataaaagaaaaagaaaatgt

SEQ ID NO: 1528 - DNA, 163 bp, Homo sapiens
actatgaaagttttatttatgccccattaagtcaaaagtaaattatagtaagctaatgacctgcatattttcatatggatgaatgtcagtatatctaaataggaaataaatggcgatcctatctacctatataaaaaaaatagaatatctttccagattttgc

SEQ ID NO: 1529 - DNA, 529 bp, Homo sapiens
  misc_feature 485, 499: n = A,T,C or G
actgatgcaacagttgggtagccaatctgcagacagacactggcagcattgcggacaccctccaggaagcgagaatgcagagtttcctctgtgatatcaagcacttcagggttgtagatgctgccattgtcgaacacctgctggatgaccagcccaaaggagaagggggagatgttgagcatgttcagcagcgtggcttcgctggctcccactttgtctccagtcttgatcagctgcacatcactcaggatttcaatggtgcccctggagattttagtggtgatacctaaagcctggaaaaaggaggtcttctcgggcccgagaccagtgttctgggctggcacagtgacttcacatggggcaatggcaccagcacgggcagcagctggcaccttattggccagcaacatgtccctgatctcagtgaggtcctccttggtgaacacaaagcccacattcccccggatatgaggcagcagtttctncagagctgggttgntttccaggtgccctcggatggccttgcacc

SEQ ID NO: 1530 - DNA, 346 bp, Homo sapiens
aaataattatgccatggcatttgacagttcattattcctataagaattaaattgagtttagagagaatggtggtgttgagctgattattaacagttactgaaatcaaatatttatttgttacattattccatttgtattttaggtttccttttacattctttttatatgcattctgacattacatattttttaagactatggaaataatttaaagatttaagctctggtggatgattatctgctaagtaagtctgaaaatgtaatattttgataatactgtaatatacctgtcacacaaatgcttttctaatgttttaaccttgagtattgcagttgctgctttgt

SEQ ID NO: 1531 - DNA, 429 bp, Homo sapiens
  misc_feature 116: n = A,T,C or G
ggctgagtcaggagaacggcgtgaacctgggaggcggagcttgcagtgagacgagatcgtgccactacactccagcctgggcgacagagcaagactccacctcaaaaaagaaatanttagcaaatattaaaggacaagagggaatatctgtttaaaaaattataatgcacgttagatgaaaagtaataggatgagatggttgttgctgaaatagcacttgctatataaattcaaacattccttttcaaattcagcttctcagaggtttgacttcagatgcttgagcactttcaacattatctttgcctttatccttctttatgcggataaacacaactgctaaaattataccaatcaccagaagggtggtcagcagtataccaactgccatgcccacagtgggtatcccagtctggtgacctgctggcc

SEQ ID NO: 1532 - DNA, 162 bp, Homo sapiens
acgggccaggaagaatatgtggcagagctcctggaaatgatgcagattaggtggcatttttgtcagctctgtggtttattgttgggactattctttaaaatatccattgttcactacagtgaagatctctgatttgaccgtgtacctcggcgcgaccacgct

SEQ ID NO: 1533 - DNA, 358 bp, Homo sapiens
actcaagtttataatgtccccaaaccttaagactagaaaatcatcccaagaaaaaggcctatagttggtttaatttcaccctgagaatactgtgataaaaatcaatatatttcagagctagtaagtatttaaaaattagtgtctcaaaaaggggacatcataagggaaatacagggtttagaggtctgagctcaagtggtgtaagacagttctttcttcttcctcctttaaactcttcactttgctctaacacggaagatgggggacagtgatcccgaaggtattactaaaatattgcagctttcagtaattatgagaagcacagatatcaccagaaaagaaagcaatcatttggagt

SEQ ID NO: 1534 - DNA, 526 bp, Homo sapiens
acaaagaccaaaacaaccaaatgccaccgctgccctgtgggtagcatctgtttctctcagctttgccttcttgctttttcatatctgtaaaaaaaaaaaattacatatcagttgtcctttaatgaaaattgggataatatagaagaaattgtgttaaaatagaagtgtttcatcctttcaaaaccatttcagtgatgtttataccaatctgtatatagtataatttacattcaagtttaattgtgcaacttttaacccctgttggctggttttttgttctgttttgttttgtattatttttaactaatactgagagatttggtcagaatttgaggccagtttcctagctcattgctagtcaggaaatgatatttataaaaaatatgagagactggcagctattaacattgcaaaactggaccatatttcccttatttaataagcaaaatatgtttttggaataagtggtgggtgaataccactgctaagttatagctttgtttttgcttgcctcctgattatctgt

SEQ ID NO: 1535 - DNA, 466 bp, Homo sapiens
gttcaggacctcttcccattgaagctataatttatttggaccaaggaagccctgaaatgaattcaacaattaatattcatcgcacttcttctgtggaaggactttgtgaaggaattggtgctggattagtggatgttgctatctgggttggcacttgttcagattacccaaaaggagatgcttctactggatggaattcagtttctcgcatcattattgaagaactaccaaaataaatgctttaattttcatttgctacctctttttttattataccttggaatggttcacttaaatgacattttaaataagtttatgtatacatctgaatgaaaagtaaagctaaatatgtttacagaccaaagtgtgatttcacactgtttttaaatctagcattattcattttgcttcaatcaaaagtggtttcaatattttttttagttggttagaatactttcttcatagt

SEQ ID NO: 1536 - DNA, 369 bp, Homo sapiens
acaagaaagtatggtgcaacagcaacactccagcagatgttatagtgtgctacgggagcccaggagaaggcggagtgatcaattttggggaagacaagatgtggcagaagcgttcacaaaagtaatggtgtctgagcagggttctaagggatgcataggagttctctggcagatggttggggaaactttcaggctgaggaaatatctcaagcagacatgtagaggtatgaaagacacagggcagaggtgccggggcatggctctgtgagggcacgggtatgaggctagaggagccctgggtctgcctttacttacccgggtctgctctagccctagccctcgggagtcagggaaggggaattgcctaag

SEQ ID NO: 1537 - DNA, 305 bp, Homo sapiens
acagtatttattttgtttctgttttactttaaatttgtaagtctttaagtagcttacattgattattataggggaggacaagtgacttgtttaaagttgtatttagtattctttccaatttctgtattttaaaatattgaaattaaaattgtattacttctgttttgatttttttagcactcagtgtattttttgctcattttgtttgaaagtataaatgttgaaaattgtataaaatgcgtccttgaaagaaaaagaatctgaattctatatccaaaaaaaaaaaaaaaaaaaaaaaagcttgt

SEQ ID NO: 1538 - DNA, 332 bp, Homo sapiens
  misc_feature 150, 229: n = A,T,C or G
gtacaagctttttttttttttttttttttttttttttaggggtttttgtttgtttaatacatctgaaaagaatgcatatacaaagaattgagacatgagaaagcattggttcaacactaatgcatctacaagaattaggtttgggaaggngggaaagattacctcaacatttttaaaaattggaaactgcaaccaaaataagctgaaaaaatccctattaacacttaanaagagtctgcattaagagtctttccatgatttttattaaactagagagcctcacctggctgctctagggttcctcatatgcaaaacagaaataaggggattcc

SEQ ID NO: 1539 - DNA, 329 bp, Homo sapiens
acacctggaacgggctcggtgcatccttcgtttttgtgaccatgatactgtttgtggcgaacacgcagtccaaccaactctccgaagagttgttccaaatgctttacccggcaaccaccagtaaaggaacgacccacagttacggatactcgttctggctcatactgctcgtcattcttctaaatatagtcactgtaaccatcatcattttctaccagaaggccagataccagcggaagcaggagcagagaaagccaatggaatatgctccaagggacggaattttattctgaattctctttcatctcatttggcgttgcatctattgt

SEQ ID NO: 1540 - DNA, 355 bp, Homo sapiens
acaaagtccaaattcttactttatggatgtaaaatgtccaggttgctacaagatcaccacggttttcagccatgctcagacagtggttctttgtgtaggttgttcaacagtgttgtgccagcctacaggaggaaaggccagactcacagaagggtgttcatttagaagaaagcaacactaatgattcaaacagcttcctgaattttaattttgtgttgtctcacagaaagccttatcataaattccataattctaattaatttaccaagataatgtaattacatttggttttgtaaggtatacagcagtaatctcctattttggtgtcagtttttcaataaagttttgattatgg

SEQ ID NO: 1541 - DNA, 346 bp, Homo sapiens
  misc_feature 40, 42, 79, 116, 126, 267, 281: n = A,T,C or G
acaagcttttttttttttttttttttttttttttttctgnanaccacaaaatccacttttatttggtagtttttacatntatggccaaatagtattgggttggcacagtaatctanagtttacctntgaaaaaaagtaatgtgagtctgtctaaccatattttcctaactcaacagtaggatcatgatggtaaggcaaatgcaagttatttttaccatgattctcaaatgtgaattgaatgttacagtagcaaatacttttgacctnttgtgatgagtcanaactagaacttaattctttgactttcacattttttaaaaagtgtattgctgggatcataaacatt

SEQ ID NO: 1542 - DNA, 161 bp, Homo sapiens
acttatagttgctaacaaacaagatttgaggaactcattgtcactttcagaaattgagaaattgttagcaatgggtgaactgagctcatcaactccttggcatttgcagcctacctgtgcaatcataggagatggcctaaaggaaggacttgagaaactac

SEQ ID NO: 1543 - DNA, 463 bp, Homo sapiens
acagcagccttggttcctctgggggttgagaataagaatagtggggagggaaaaactcctccttgaagatttcctgtctcagagtcccagagaggtagaaaggaggaatttctgctggactttatctgggcagaggaaggatggaatgaaggtagaaaaggcagaattacagctgagcggggacaacaaagagttcttctctgggaaaagttttgtcttagagcaaggatggaaaatggggacaacaaaggaaaagcaaagtgtgacccttgggtttggacagcccagaggcccagctccccagtataagccatacaggccagggacccacaggagagtggattagagcacaagtctggcctcactgagtggacaagagctgatgggcctcatcagggtgacattcaccccagggcagcctgaccactcttggcccctcaggcattatcccatttggaatgtg

SEQ ID NO: 1544 - DNA, 139 bp, Homo sapiens
agacaccctctgggggtcctctctgagtcaaatccagtggtgggtaattgtacaaaactttttatatcaaaaggctttgcacatttctatatgagtgggtttactggtaaattatgttattttttacaactaattttgt

SEQ ID NO: 1545 - DNA, 391 bp, Homo sapiens
acccaataaccagctccggcacatcaggctggagaataacgacaacaaaccggtcacaaactcccgggacacccaggaggtgcccttagaaaaagccaagcaagtgctgaaaattatcagttcctacaagcacacaacctccatcttcgacgactttgctcactacgagaagcgccaggaggaggaggaggtggtgcgcaaggaacggcagagtcgaaacaaacaatgagggcgaaccagtttcttacatgttctaacgtttgactttgaaaacagtttaaaacacgtgtgcttggtcagctccagtgtgtcgtcccgtgcgggggttgagtgttgcatctttgcctttcttgtcgttgatttttgcccagatggatctgcatttatttgt

SEQ ID NO: 1546 - DNA, 509 bp, Homo sapiens
  misc_feature 390: n = A,T,C or G
acagattaacttaacacaaaaacccgaacatcaaaatgaaggtgtgtggaggaaaggtgctgctgggtctccctacaactgttcatttctttgtggggcagggggtagttcctgaatggctgtggtccaatgactaatgtaaaacaaaaacagaaacaaaaaaacaaggaactgtcatttccacgaaagcacagcggcagtgattctagcaggcctcagggccctgggcctggggaggctacatgagggggagcctcagtcataggatcaacctggggcccgaaggagcagggttccctgcctctccctctgcaacagatcatcccatccaacacaacccccaaaatgttgatgatgacgcaacatggtcaaccctcaagacctttaagncaaaacagagcagcataggaaaaaaaaaaaaacaaaacgcaccaatttctgcatgtgtcaatggtagggcaccattttaaaaagtctgtctaaaacagtctgtcttcacttggagggac

SEQ ID NO: 1547 - DNA, 364 bp, Homo sapiens
gtatagttgcttgcctgatataaatgcaatattaatgcctttaaagtatgaatctatgccaaagatcacttgttgttttactaaagaaagattacttagaggaaataagaaaaatcatgtttgctctcccggttcttccagtggtttgagacactggtttacactttatgccggatgtgcttttctccaatatcagtgctcaagacacagtgaagcaaattaaaaaaacaaaacaaaaaaaatccctgaatgatgattagagacatcaccgctaaaaaactacatttataagctaggatttgttatatgcaaatattttctgcctcttcttttgttctgtttaaaacaataaaatgcatttgta

SEQ ID NO: 1548 - DNA, 499 bp, Homo sapiens
acagtggtgagatcatagcttactgtagcctcgacctcccgggctcaaagatcctcacacctcagccttccaagtagttgggactacaggcatatatcatcatgcctggctaaattaactattttattttaagagatgtggtctagctatgttacccaggctggtctcgaactcctggcttctagcaatcctcccacctcagtctcctgaatcactgggattacaggctggggccatcatgcccagctctaggtttttaaaatgtaggcaaggaggtcagcatttacacaaaagcagggtttgatcttaggaagcttaataaagagaggggtctaatcaaggtttcctgtaggatctgggcttaagttaggccttaaagaacgaagaatgtttgtgggtgtagtaagcaatgacttggagcagagccctctagccattgggctcaccctcacaggcaggcgccactgaccctaggggggtgtaggcagctggaggaagt

SEQ ID NO: 1549 - DNA, 489 bp, Homo sapiens
acaaaataaaaataaaaaaatcatcatctggcaaaaaagggaaacagggtaagagagagtgacattttaacacattactaaaatgtttaagcttttatttacacatccccttctctcagtttcccaggttatatgaacattacagcaatagaaaggggttatcatcacagcatccccttgcaaattccagtttacaggtaacttggtcaggggaaaaatatgggtcaacgaagtaagatctcagctctcccataagctattgctctcttcttctctttcccccttctcttaatgttagctgcctgttacagagagggatcatcaagactgtgtggacatgctagctgaattgacagggtgggttccagtgtcctgtgaagaaccagcaaggatgctttttataattccaaccattggcttcacatcactgaggtaacaagacttaatgttaagggtaaagacaccacgccaccctagtcagtgacatgt

SEQ ID NO: 1550 - DNA, 224 bp, Homo sapiens
acgaactccacggcggtggggcgctaactagcagggacccccgcaagtgttggtcgggggcctcgagctgcctgagctgacacgaggggaggggtctgtgtagccaacaggtgaccgaagggcttgcctgcccacagcttacttggccaaggggtttctgaagttcctgccggcaaacttagccttgctgcccagctcctcttcaattctgaggagctggttgt

SEQ ID NO: 1551 - DNA, 394 bp, Homo sapiens
acaagtgaataactaatacagggaagttactgtaagcatctatctagatcacagctgaggcataaaaaaggatgtcagggtgggtgtgcaccagacacagtgggagctgggcagagacagacacataagcaaagggagcaaaaggcacttggacaggagagccagcctagcccaagtcctaccaggggactgcacagtgtggtgtggccggaacagagtgcagtggcagcaggcaggcaagacaaagtcctggtctaggaggagccaaaggatgaagctggctgtgaggggcacagcctgcaggaatgtcacgtggtggtctcaagtagcagtgaatgcaacaccttcccatggccacagaaactccttgggtgacagctgtggtgccttcagc

SEQ ID NO: 1552 - DNA, 321 bp, Homo sapiens
acagacattttcaaagttgccagtgttactttaattggactgccttcgtaattcattgcctctgcttcaacaatgtacaactcatcctttgcaccagcccctaaactgaccgttcttaaagataactggtgctcattttcatcattatccaccttaaagtgataatctttgtcggcctttagttcacaaccgaaaagatagttctggggcctcagggggctcatgtccatgtccatcgaatcttccatcgggtggcggcacgcacttaggtaggagagaaggcggacggagataaaagaacgctgctccagagaacaaccg

SEQ ID NO: 1553 - DNA, 205 bp, Homo sapiens
acccccttccacttcgtctcccctagctcctagaagcaaccactgatgtgatttctaccaaatccagttttggtcctactaaatatactcttttgagactggcctcttttactcaccataatgcctttgtaattcatccatgctgttgtgtgtatcagcagtttgttccttttcattgctgagtagtattctattgtagagatgt

SEQ ID NO: 1554 - DNA, 370 bp, Homo sapiens
acaagtttgaatttacgtattcctggccaaataaccaaggtgaagaaaggtaaggggaagaaaaaaaagaaaaaaaaaagggctgtatccaaacaaaaacaactcgagatcagagaattggtctatatttcattaagataaattgtttcaaatgaaacatttggtaattgagaatactactttaatatctgagctacttagggccctttcctttttaaaaaataggaccaaacaatttaagagttaaagacacactatcctttccccacccagtgcaatacctgtaattttcttttggggttccaaatgttcactgcttcttattgcaattcttttgccacatccattagaatatgaagtcccagtcagt

SEQ ID NO: 1555 - DNA, 477 bp, Homo sapiens
acagtattttgaatgtgagatgattgtcaggactaactgtctttttaacaaaacattttcaaactgttgcaaatagaaaaaaaatagaataagtatatatttttggagtaacatcaatatttaaacatttttacacagatcggtgtttgaaaatttgccatttcaggctaatatttttatatatttttgactttttaaaagttcatcagtgtttttgctactgttaagcttatgcagtttatactgtattttttatgtatcctttatatttaccaaacctgactccctgtaaaggagtgctgtcttaaaaacaactgaaggggttaaagtcgtttcttttagtttaatagatgtgcataaggtagctttagcaattaaattctagtgaagttgatatagtctcatttttaattgtcctgtaatggaacagtagcaaattcactaaacttttgtgttcagagttaaattgttctcagt

SEQ ID NO: 1556 - DNA, 467 bp, Homo sapiens
acatatattaaatggctatagcataaacattgttctatgggattttatagaagaaaaatcaagtggggagaattacttatgaaacattaacaaaaacccgtgatattgaagaacaagatgttctcatattcatttgatttcatctacttatttttggtgtcattttattgatactggcccagactttccatttcccgtaattattaggtcagaaaaatgaaagcagcgggagggaacgcggtaaggcacctgtgggagacgggagcgctcctccgcaggggtgagacggtggctgccagtgttgagttcgagctgacggtgtgccaaggtcctgttttgctttatgccgttaagtgaagcgctggaagtgctggtgctcagaaacaccctgtgtgaagtttcggatgtagtcgggaagggcgctggtctgttctttctctccaacctcagagcgccggggactttgt

SEQ ID NO: 1557 - DNA, 372 bp, Homo sapiens
ggcaggggcccttagagtcttggttgccaaacagatttgcagatcaaggagaacccaggagtttcaaagaagcgctagtaaggtctctgagatccttgcactagctacatcctcagggtaggaggaagatggcttccagaagcatgcggctgctcctattgctgagctgcctggccaaaacaggagtcctgggtgatatcatcatgagacccagctgtgctcctggatggttttaccacaagtccaattgctatggttacttcaggaagctgaggaactggtctgatgccgagctcgagtgtcagtcttacggaaacggagcccacctggcatctatcctgagtttaaaggaagccagcaccatagcagagt

SEQ ID NO: 1558 - DNA, 465 bp, Homo sapiens
gccggcgccattttgctggagcctgcgaccgagtgggagtggagtggagcggctgtggttgccgactctttcctcttccccacggtccagtcagcgggttaattaggccatcggccctcgagccgagacttgtctcttatttagttctggggagcgcctcgtcgacatgagtgatgtggaggaaaacaacttcgagggcagagagtctcgctctcagtcaaaatctccaacgggaactcctgctcgtgtaaaatcggagagcaggtcaggatctcgtagtccatcaagggtttccaaacactctgaatcccattctcgatcaagatcaaaatccaggtcgaggtcaaggagacattctcatagacgttacactcgatccagatcccactctcactctcataggagacgatctcgaagtagatcatatacaccagaataccggcggcgaaggagccgaagccattc

SEQ ID NO: 1559 - DNA, 350 bp, Homo sapiens
acctaaccagaatagatgaggcagcaagagaatggcgctcggtgtgtggggtaaggggagtcaggaggaggacgggctgctcgtgagacagggtaggatgggctgtgcctggtttcctctcaagcccccaggctgctacccttggttctagccacctttcctcccaccctccttctcacgcaggctgccaaaaattgcactttgggtctgagattaggagcgcctggccatgtctgaaccccgctcctatcttagtggccgaaggtggctcccaggaaagcatgaatcctgaggttttactggtaagctgggagggattaactgggatccagtcatgtgctccacccagt

SEQ ID NO: 1560 - DNA, 327 bp, Homo sapiens
actacatgattgaactttccttctactggtccctgctcttcagcattgcctctgatgtcaagcgaaaggatttcaaggaacagatcatccaccatgtggccaccatcattctcatcagcttttcctggtttgccaattacatccgagctgggactctaatcatggctctgcatgactcttccgattacctgctggagtcagccaagatgtttaactacgcgggatggaagaacacctgcaacaacatcttcatcgtcttcgccattgtttttatcatcacccgactggtcatcctgcccttctggatcctgcattgcaccctggtgt

SEQ ID NO: 1561 - DNA, 290 bp, Homo sapiens
acttattcgaatgatatacttgtgagctgttccatggtcataatcatccccaggagctgtccaagtcagattaatgagactgcccccgtgaatttccgccttcaggtcggtgatttggccaggtgggaagagatcaggtatgggagcatttgggacatcagaagccacaaatgagcctcccgaggatgttctgctgaaacacacttgcttgtgttgaacatcatccttattaatttcaggtcttggtggattccattgtatttcatcattctcaatccagccaggtatgt

SEQ ID NO: 1562 - DNA, 259 bp, Homo sapiens
ctgagcaagaaggagctgaaggagctgatccagaaggagctcaccattggctcgaagctgcaggatgctgaaattgcaaggctgatggaagacttggaccggaacaaggaccaggaggtgaacttccaggagtatgtcaccttcctgggggccttggctttgatctacaatgaagccctcaagggctgaaaataaatagggaagatggagacaccctctgggggtcctctctgagtcaaatccagtggtgggtaattgt

SEQ ID NO: 1563 - DNA, 382 bp, Homo sapiens
acaaggcaggcaaattgcctcctgacctcaggcagatgtttaagtcttcaccaactaagaaagctctgttattctggcctgggtgctcgctccagactcaggaacatctggtcaacacaagcatcactgggctggggaattgtgtgtgtgctgcatcatctccgactctcttgtagttccttccttccctccctcactcttacatgcagacacagacagacacagtctggttgggacatgcagtggcagctcctggtgtataacatctttcacacaccttgagtctatctgcttgctgcctttgactgatcctgaaatggttggcctttcagcaagttccttgtctgtgtcctttatgtattggaggagaagggcaaaggga

SEQ ID NO: 1564 - DNA, 281 bp, Homo sapiens
ccttcctccatcccccatactaaatcctagcctcgtagaagtctggtctaatgtgtcagcagtagatataatattttcatggtaatctactagctctgatccataagaaaaaaaagatcattaaatcaggagattccctgtccttgatttttggagacacaatggtatagggttgtttatgaaatatattgaaaagtaagtgtttgttacgctttaaagcagtaaaattattttcctttatataaccggctaatgaaagaggttggattgaattttgatgt

SEQ ID NO: 1565 - DNA, 491 bp, Homo sapiens
acactcgagatgaagatcacattgcattgatcatagaacttctggggaaggtgcctcgcaagctcattgtggcaggaaaatattccaaggaatttttcaccaaaaaaggtgacctgaaacatatcacgaagctgaaaccttggggcctttttgaggttctagtggagaagtatgagtggtcgcaggaagaggcagctggcttcacagatttcttactgcccatgttggagctgatccctgagaagagagccactgccgccgagtgtctccggcacccttggcttaactcctaagcccctgcccagcaccacagcagagatcacacactgaccctccgcccttccccttcaagcattttcctcttcccttttcagggtgaagctcttccttcaagagtttctagatcttgtttttttttaatccaacatgttcatttgggtttgcttacttgaccctgtggagatccccacagccattgggcatcctaggtg

SEQ ID NO: 1566 - DNA, 379 bp, Homo sapiens
acttgagtattttatgggttctgctctaagctgaagcagaactgcctgcctgagaaccctgaactaggttagttttgtgggtccttcgtggggcagcatctatgtaggaggctggactttgggttcctcttgaaataatgaggtccctagagggatccttagaaccaactaatcctaccaagagcttttaaaacatgctggtcaaatatggcgattccctggtgcaacccccagatctcctggtctgttaggcagccctgataactctcaagtaatcctgtagtccactggtaaaaaatagatgggtcccatgataccatatagtatctatgcttattggctgggcctcctggtggctcttggcactgtaatttctagt

SEQ ID NO: 1567 - DNA, 490 bp, Homo sapiens
acaatcaggaacatattttaaaaccattaccattaaaataaatgaagatcataaatcacaatttagtttgttcttagtgtatatactcacattaaaatataaagaacatataccaaaaagagccaaaagtgtgcattttgctaaaacctggtatatacatattccattggaaaaaagcaatcaaaaatgacttaaaccaaaactaagttcctgtgatgtgtagtaaccattatattgtttgtatgaggtagtaactaaattattttggccatgtattaatactctaagtcaaaagaaatatgaaaaggatcataaaataaggcccacaaaagtaaaaattccaagagaaatttgaaccacttcactctatggaatgttacagttcttcagtgtgatcatatgaaatgtttagtgaggactctttaataatgctaattaattctttgtgcatactgtaattctgaccacaattgcagtattctatcatggt

SEQ ID NO: 1568 - DNA, 294 bp, Homo sapiens
  misc_feature 290: n = A,T,C or G
acttaagtctttattatatttgaagcaattttttttcaattttaaaagctgaatgaagacaacttaggttgctaacctagttcaaaatgaaattatttagataccaatttttaaaatactggagagaatttatatgtctttttccagagttctgatgataagcatttggagtgcatttattcctccagataataaatgtgtgttcagaactttttgtgttttttaaggcattaataaagccttcgataatattaaatacagaaaaaaaaaaaaaaaaaaaaaaaaaaaangctt

SEQ ID NO: 1569 - DNA, 469 bp, Homo sapiens
acggctagtcagagacaaagacacagataaatttaaaggattctgctatgtagaattcgatgaagtggattcccttaaggaagccttgacatacgatggtgcactgttgggcgatcggtcacttcgtgtggacattgcagaaggcagaaaacaagataaaggtggctttggattcagaaaaggtggaccagatgacagaggcttcagggatgacttcttagggggcaggggaggtagtcgcccaggcgaccggcgaacaggcccccccatgggcagccgcttcagagatggccctcccctccgtggatccaacatggatttcagagaacccacagaagaggaaagagcacagagaccacgactccagcttaaacctcgaacagtcgcgacgcccctcaatcaagtagccaatcccaactctgctatcttcgggggtgccaggcctagagaggaagtcgttcaaaaggag

SEQ ID NO: 1570 - DNA, 202 bp, Homo sapiens
  misc_feature 30, 71, 76, 87, 90, 95, 111, 134, 149: n = A,T,C or G
tttttttttttttttttttttttttttttnccttcttaaaaatattacatgttttattatcctgtccccanagggnggtttatccanaanccaanaaaaaaaatcaatcanaataaactcaaaaaaaaaaggtngggggagcaaaaccntcaaccaccaggcagccaggccatcagcccacctccacctttgaagggtcccc

SEQ ID NO: 1571 - DNA, 503 bp, Homo sapiens
  misc_feature 271: n = A,T,C or G
ctttttttttttttttttttttttttaactttcaaaaaactaattttaatcaaaacaaaaattgttgatcattaacaagtttataaaacagtgatttagttacataaataaattgatatcagtgtatcaaatcttaattactttcaacttcatgagcatgtttacatgggtgatgaattacaacctttttttttctttttacctattataataaataaaatggagcgcatgaaatagttcttctaaacaaaaatacctacaaacatacctntaagcatgttctctagtgaagggaacaagagacactggacaacttttgcaccaaaacataaaaattgctttaaaaagcacaaggttacagaaccatcagctaaagtaaagacactatactgtaaccaaagttggtatttaataatataatgaacagtttggtagttagatctccagtttggttattttaaagcattaagacaaggcaagatagaaggctgcttttgtttgag

SEQ ID NO: 1572 - DNA, 312 bp, Homo sapiens
  misc_feature 264, 295: n = A,T,C or G
acatttgaaagtagtgttctagactataaaaccaatgaacttctacatgagccctacagacaggcatgtgtagaaggcaatttatcaaacctattgcactgccatgaaaagtgtgtataataatttgctagcccaagcaagctagttttctttgcttgcttcttttctttcttttttccttcctttttttttttttttcttttttaacatgttgagattctctagttgttttctttggcgtatctaaccccttcttttgttttntgagacctggtaacccacgctcttgcattgnggattttaaaatgtata

SEQ ID NO: 1573 - DNA, 290 bp, Homo sapiens; identical to SEQ ID NO: 1561

SEQ ID NO: 1574 - DNA, 408 bp, Homo sapiens
  misc_feature 406, 407: n = A,T,C or G
acgatgtctagtgatgagtttgctaatacaatgccagtcaggccacctacggtgaaaagaaagatgaatcctagggctcagagcactgcagcagatcatttcatattgcttccgtggagtgtggcgagtcagctaaatactttgacgccggtggggatagcgatgattatggtagcggaggtgaaatatgctcgtgtgtctacgtctattcctactgtaaatatatggtgtgctcacacgataaaccctaggaagccaattgatatcatagctcagaccatacctatgtatccaaatggttctttttttccggagtagtaagttacaatatgggagattattccgaagcctggtaggataagaatataaacttcagggtgaccgaaaaatcagaataggtgttggnnt

SEQ ID NO: 1575 - DNA, 498 bp, Homo sapiens
  misc_feature 489: n = A,T,C or G
cacttattaagtgcctactgtgtgccaggctctgaactaggtggtggcagttagtatttcttccaagttaacaattcatagccagaactttggcttttgtattttgacaccaatgaaaacacgaatcatgtagacagaatcctgattcatggctctgggctctaggtaaaactcaaaactttaatggacaccctagggtgttactcaacacagtatgaaaggctactgaaggaagaagtgtctgctggtcagtagcaaagatccttttgggacagttaatctccttttaaaggctctaagtcccagtggcttctcagctgtcctaagaagataaggacaaggtcactaaggccactgtaatttagatccctggtctaaagtctcttgtaagttcagctagagtaataacatctttcaacaaatggtatccaggattaggggggatatctgagatgggggagtgatagatatgtccagtgtcttgattgnggtgatgct

SEQ ID NO: 1576 - DNA, 472 bp, Homo sapiens
acttatttcaacaattcttagagatgctagctagtgttgaagctaaaaatagctttatttatgctgaattgtgatttttttatgccaaaattttttagttctaatcattgatgatagcttggaaataaataattatgccatggcatttgacagttcattattcctataagaattaaattgagtttagagagaatggtggtgttgggctgattattaacagttactgaaatcaaatatttatttgttacattattccatttgtattttaggtttccttttacattctttttatatgcattctgacattacatattttttaagactatggaaataatttaaagatttaagctctggtggatgattatctgctaagtaagtctgaaaatgtaatattttgataatactgtaatatacctgtcacacaaatgcttttctaatgttttaaccttgagtattgcagttgctgctttgt

SEQ ID NO: 1577 - DNA, 342 bp, Homo sapiens
acctggagcggagggtcaggcacaggtaggaacggggctcacaggccgagcagagccccctctggcccctactcaattccttcctgcttgtcttttatggccacccgaaagcgctcctccagcagggacagctcactgatgaggtcggtgatggcgttggtaaaggcttcctgggggctgtagtccggcgtggtctgcactcggatgatgatcttgtgctccaaggggtgggggactttgtagccagcaaatagcacttgcgggtcttttaggagttgtgatttaatgatgtttcccagtgtgtggtcttctttgttgatggtgaataagcaggcattgggt

SEQ ID NO: 1578 - DNA, 256 bp, Homo sapiens
accatactacaaatatttaaatgcaaaattaccaacctatatagcagttttatttgccctataggttgcatactaacttaagcattcatgtcaccataaaatgcctttagcatttctcaatgactggatgggaaattttcctttattgcctagctgcttgtgtttgagtggttgtcctatgagcaatgcatttggagttcttcagctttcactacttctctgttgcttgctaatcatgtaactactaaaatactgt

SEQ ID NO: 1579 - DNA, 313 bp, Homo sapiens
acgctttctcaggtccccaaggatgggtggccaggtcccccactgggagtggaggtctcactcccttccttgggttctgacctccacattatctggctgtgagggtgacctgcctggctttccccaccaagtgcagctccccgcagctgaaagccacactctcagcacaggactcctgagatctgacactggccaattcacaccctgcttgaagctggcatttgaaaggccttcaggttgacaacagcagcaacaagtttgctgttcaaagtaggccaagtcacggctttgaacggcatcatttgaaaagtgc

SEQ ID NO: 1580 - DNA, 200 bp, Homo sapiens
cttcgccaccatgccgccctacaccgtggtctatttcccagttcgaggccgctgcgcggccctgcgcatgctgctggcagatcagggccagagctggaaggaggaggtggtgaccgtggagacgtggcaggagggctcactcaaagcctcctgcctatacgggcagctccccaagttccaggacggagacctcaccctgt

SEQ ID NO: 1581 - DNA, 463 bp, Homo sapiens
accttctgaagtgaatgtcgtttctaaatgggatcccaatgcctggcgggagaggcagcctcactctactgtgcaggctggacaaaggtcccggccctgaagtcttagactgtgagagtcaacggcatgtgaagtggagtgtgcagacctctggaggagcagcacgtcaatgtctcatttccagtttacttaaaccacacacagaggcagcctctacacttgccaacagcctctgtgccgaggtgttaagggaccctggccggggactcagaacttagaactttctggcctctgaagaggacccaggaaactggcgagacctcatgtgacccctgaacaggtcatacaagccacttctgaactaagattgggaaggtgttccacactggcatgggatcctgttcagaagcggaatacatcgtagtgctatctggagagactgatgtgaaactgcttcaccagg

SEQ ID NO: 1582 - DNA, 562 bp, Homo sapiens
  misc_feature 502, 504: n = A,T,C or G
acaggatcccagaacctcaaaaacctcaactgaagccacctgaagatattgttcggtccaatcattatgtccctgaagaagatgaagaatattatcgaaaacagctgtcatactttgaccgaagaagttttgagaataagcctcctgcacacattgccgccagccatctctccgagcctgcaaagccagctcattctcagaatcaatcaaatttttctagttattcttcaaagggaaagcctcctgaagctgatggtgtggatagatcatttggcgagaaacgctatgaacccatccaggccactccccctcctcctccattgccctcgcagtatgcccagccatctcagcctgtcaccagcgcgtctctccacatacattctaagggagcacatggtgaaggtaattcagtgtcattggattttcagaattccttagtgtccaaaccagacccacctccatctcagaataagccagcaactttcagaccaccaaaccgagnangatactgctcaggcagctttctatccccagaaaagttttccagataaagccccagtta

SEQ ID NO: 1583 - DNA, 538 bp, Homo sapiens
  misc_feature 525: n = A,T,C or G
accgaccatagagcaagaatcaagattctgctaactcctgcacagccccgtcctcttcctttctgctagcctggctaaatctgctcattatttcagaggggaaacctagcaaactaagagtgataagggccctactacactggcttttttaggcttagagacagaaactttagcattggcccagtagtggcttctagctctaaatgtttgccccgccatccctttccacagtatccttcttccctcctcccctgtctctggctgtctcgagcagtctagaagagtgcatctccagcctatgaaacagctgggtctttggccataagaagtaaagatttgaagacagaaggaagaaactcaggagtaagcttctagaccccttcagcttctacacccttctgccctctctccattgcctgcaccccaccccagccactcaactcctgcttgtttttcctttggccataggaaggtttaccagtagaatccttgctaggttgatgtgggccatacattcctttaatnaaccattgtgtac

SEQ ID NO: 1584 - DNA, 162 bp, Homo sapiens
ataaaatctagacaaaaaaggaaggaatcgaaccccccaaagctggtttcaagccaaccccatggcctccatgactttttcaaaaaaaaaaaaaaaaaaaaaaaaaaaaaaaaaaaaaaaaaaaaaaaaaaaaaaaaaaaaaaaaaaaaaaaaaaaaaaaaa

SEQ ID NO: 1585 - DNA, 238 bp, Homo sapiens
actttgttggtccaactcagacagcaactttaagatgttcagcgcagccatatcatggtaggactccacatccttgccgataccatggctgatcagaggtggctgagaggagcaattgataagagatacaaattcgttcttgttgtttttggggaagtctttgtattcaacctggaatccctggactctggaaagatagtccagttgctcagagggtctcgtgagaggtccatggggt

SEQ ID NO: 1586 - DNA, 496 bp, Homo sapiens
actcccgattgaagcctccattcgtataataattacatcacaagacgtcttgcactcatgagctgtccccacattaggcttaaaaacagatgcaattcccggacgtctaaaccaaaccactttcaccgctacacgaccgggggtatactacggtcaatgctctgaaatctgtggagcaaaccacagtttcatgcccatcgtcctagaattaattcccctaaaaatctttgaaatagggcccgtatttaccctatagcaccccctctaccccctctagagtcaaaaaaaaaaaaaaaaaaaaaaaaagcttgtactgtttgcattaataaattaaagctccacagggtcttctcgtcttgctgtgtcatgcccgcctcttcacgggcaggtcaatttcactggttaaaagtaagagacagctgaaccctcgtggagccattcatacaggtccctatttaaggaacaagtgattatgctacctttgcacggttagggt

SEQ ID NO: 1587 - DNA, 466 bp, Homo sapiens
ggcgattggtgttggcggtctggctcagctgggcagggggtaactttactgatttgggggtggtttttagtttaatttttcttttctagcttcccatcgacggtcagtgcgcacgttgtaatcagctgaggccatgtcaggagacggagccacggagcaggcaactgagtatgtcccagagaaggtgaagaaagcggaaaagaaattagaagagaatccatatgaccttgatgcttggagcattctcattcgagaggcacaggtttagtgatataggattacatttccttctctatgggtccaatcacactacttggttctgcagtgaataatattttcataatcctaacattgtaaatgctgtttattggttttcaattttagaatcaacctatagacaaagcacggaagacttatgaacgccttgttgcccagttccccagttctggcagattctggaaactgt

SEQ ID NO: 1588 - DNA, 250 bp, Homo sapiens
  misc_feature 46, 60: n = A,T,C or G
caagctttttttttttttttttttttttttactgatgaattctggngatattttatttanaaaaagataatcactgattttaagatcttaatttttctttcttgtaaatgctacactaattagacgtaagatagtattagataataaaagtatttacacattgaatacaaaataaatataaagtaactgaaaaacaaatcaggtttccattgacttattttgttttcccactgtccatcctctgtttcat

SEQ ID NO: 1589 - DNA, 344 bp, Homo sapiens
actattgacccagcgatgggggcttcgacatgggctttagggagtcataagtggagtccgtaaagaggtatctttactataaaagctattgtgtaagctagtcatattaagttgttggctcaggagtttgatagttcttgggcagtgagagtgagtagtagaatgtttagtgagcctagggtgttgtgagtgtaaattagtgcgatgagtaggggaagggagcctactagggtgtagaataggaagtatgtgcctgcgttcaggcgttctggctggttgcctcatcgggtgatgatagccaaggtggggataagtgtggtttcgaagaagatataaaatatgat

SEQ ID NO: 1590 - DNA, 288 bp, Homo sapiens
  misc_feature 167, 241, 264: n = A,T,C or G
acctgggctctttcaggtcccccttcctctgcagactcagcctccaggctgtttagctctcccagatagctgcccctgccacgcaggccaggagtcttcacactcaggcaccaggcctggtccaggaggagctgtggacacagtcgtggttcaagtgtccacatgcncctgttagtccctgagaggtggtgggaatggctgcttcattcctcgaggatgcccgggccccacctgggcttgnctttctgtttagagggaagtgtnacatatctgccatgaggaacataa

SEQ ID NO: 1591 - DNA, 189 bp, Homo sapiens
acatgtttggaaatgagttagatacttgaaaagtctaaacacactgatttaggagtgcgtatgttgctgtctcaatgaacaatgggtcaatagttcatatggactaaattaatctctgggtagcacgtatgtgtgtaaatataaaattatattagacattagcaccagtgcagaacatgctcagcattc

SEQ ID NO: 1592 - DNA, 475 bp, Homo sapiens
  misc_feature 450, 457: n = A,T,C or G
acaaaataaaaataaaaaaatcatcatctggcaaaaaagggaaacagggtaagagagagtgacattttaacacattactaaaatgtttaagcttttatttacacatccccttctctcagtttcccaggttatatgaacattacagcaatagaaaggggttaccatcacagcatccccttgcaaattccagtttacaggtaacttggtcaggggaaaaatatgggtcaacgaagtaagatctcagctctcccataagctattgctctcttcttctctttcccccttctcttaatgttagctgcctgttacagagagggatcatcaagactgtgtggacatgctagctgaattgacagggtgggttccagtgtcctgtgaagaaccagcaaggatgctttttataattccaaccattggcttcacatcactgaggtaacaagacttaatgtnaagggtnaagacaccacgccaccct

SEQ ID NO: 1593 - DNA, 294 bp, Homo sapiens
  misc_feature 244, 277, 278, 290: n = A,T,C or G
actttgtaagtcgtttgcgagaatgcagaccacctcactaaactgtaaacggtaaagagatttttacttttggtctccgtgagtcgcatctctactaaggtttacacaggaattccacctgaagacttgtgttaaagttctacagcgcgcactgttaactgaacgtctttttcttcagcctatacgcggatccttgttttgagctctcacaatcactcagacaacattttgtaactgctgctgntgctttctacatacaccttataaagtgacattnnaaaagaaataangtgc

SEQ ID NO: 1594 - DNA, 235 bp, Homo sapiens
cgagaatgaagactattctcagcaatcagactgtcgacattccagaaaatgtcgacattactctgaagggacgcacagttatcgtgaagggccccagaggaaccctgcggagggacttcaatcacatcaatgtagaactcagccttcttggaaagaaaaaaaagaggctccgggttgacaaatggtggggtaacagaaaggaactggctaccgttcggactatttgtagtcatgt

SEQ ID NO: 1595 - DNA, 281 bp, Homo sapiens
acaaccccaggaacccctggtgctgaaggatgtggaaaacacagattggcgcctactgcggggtgacacggatgtcagggtagagaggaaagacccagaccaggtggaactgtggggactcaaggaaggcacctacctgttccagctgacagtgactagctcagaccacccagaggacacggccaacgtcacagtcactgtgctgtccaccaagcagacagaagactactgcctcgcatccaacaaggtgggtcgctgccggggctctttcccacgctggt

SEQ ID NO: 1596 - DNA, 502 bp, Homo sapiens
acaataacaaacatgaaagtaaatgttgaataatactgaataattctgtcagaaatattttatactttaccatctatgtatgccttttaaggaatatcctcccaaagtgaaacttttgaaactgatgacattgtttttaagaattaagcagttttaaaataattagtatttaaaacaaatttatttcacagaaattcagttcaaccctaagctgggtagatggttttaggtatctttatgcaaaaaatgtatttcaatgctctttcctatgaatctctagggttgttattattcctcaattgaaattaaagctggtcataaagcaaaacagatgaattatttcagaagtaaaatgggtattaagataaaaaatgaaaggaggaggaaaaaataggcactcatacgtaatctatatattaaaacgctttgagaactcagtagccagtcttggcctggcacaaagagatctttgatatgtcacagcaaattgacccaattagtc

SEQ ID NO: 1597 - DNA, 317 bp, Homo sapiens
actattatactaaaagctcctactgtgatgtgaaatgctcatactttataagtaattctatgcaaaatcatagccaaaactagtatagaaaataatacgaaactttaaaaagcattggagtgtcagtatgttgaatcagtagtttcactttaactgtaaacaatttcttaggacaccatttgggctagtttctgtgtaagtgtaaatactacaaaaacttatttatactgttcttatgtcatttgttatattcatagatttatatgatgatatgacatctggctaaaaagaaattattgcaaaactaaccactatgt

SEQ ID NO: 1598 - DNA, 393 bp, Homo sapiens
  misc_feature 380: n = A,T,C or G
acctattctttgcagtctcaggaattgttgacatgctcacctatctggtcagccacgttcccttgggggtggacagactggttatggctgtggcagtattcatggaaggtttcctcttctactaccacgtccacaaccggcctccgctggaccagcacatccactcactcctgctgtatgctctgttcggagggtgtgttagtatctccctagaggtgatcttccgggaccacattgtgctggaacttttccgaaccagtctcatcattcttcagggaacctggttctggcagattgggtttgtgctgttcccaccttttggaacacccgaatgggaccagaaggatgatgccaacctcatgttcatcaccatgtgcttntgctggcactacc

SEQ ID NO: 1599 - DNA, 295 bp, Homo sapiens
tggcaagagagcctcacacctcactaggtgcagagagcccaggccttatgttaaaatcatgcacttgaaaagcaaaccttaatctgcaaagacagcagcaagcattatacggtcatcttgaatgatccctttgaaatttttttttgtttgtttgtttaaatcaagcctgaggctggtgaacagtagctacacacccatattgtgtgttctgtgaatgctagctctcttgaatttggatattggttattttttatagagtgtaaaccaagttttatattctgcaatgcgaacaggt

SEQ ID NO: 1600 - DNA, 69 bp, Homo sapiens
acaagcttttttttttttttttttttttttttggaaaagtcatggaggccatggggttggcttgaaacc

SEQ ID NO: 1601 - DNA, 232 bp, Homo sapiens
  misc_feature 188, 189, 220, 231: n = A,T,C or G
acaccccctacccccacctcactcccattctgtggcaccagggcggtcctgcctctgaaggacgggttctctggggctgtttgtctgagcgtgtgttccctctgttccttctggaaagaaagtggttggccaggtggcaggttggctcctgaggtgtctttgtgccccccgggtctgctgattctgcnnagacaccggcaggcgggtcatgggtcatctntgaagggaatnc

SEQ ID NO: 1602 - DNA, 239 bp, Homo sapiens
  misc_feature 105, 121, 136, 224, 232: n = A,T,C or G
ctttttttttttttttttttttttttgtttcttgactgttagttgggccttggcctatgtcatacccatgggctgccacatgggggtggagggatcaggacgaanagaggggaccagagcngggatggaggtccanactcagggagtcggcgcttcttgcagggggttgggggagaggacacggaagcctctgccccatgcaggacatttccttgctgtggcancagggcanctgtgcc

SEQ ID NO: 1603 - DNA, 333 bp, Homo sapiens
  misc_feature 121: n = A,T,C or G
accaaagagggggcctgcgtgttctggaggacgccggacctgtgccccatattctgcgactactacaaccctccgcatgagtgtgagtggcactatgagccatgtgggaaccggagcttcnagacctgcaggaccatcaacggcatccactccaacatctccgtgtcctacctggagggctgctacccccggtgccccaaggacaggcccatctatgaggaggatctgaagaagtgtgtcactgcagacaagtgtggctgctatgtcgaggacacccactacccacctggagcatcggttcccaccgaggagacctgcaagtcctgcgtgtgt

SEQ ID NO: 1604 - DNA, 318 bp, Homo sapiens
  misc_feature 123, 268: n = A,T,C or G
actattgacccagcgatgggggcttcgacatgggctttagggagtcataagtggagtccgtaaagaggtatctttactataaaagctattgtgtaagctagtcatattaagttgttggctcangagtttgatagttcttgggcagtgagagtgagtagtagaatgtttagtgagcctagggtgttgtgagtgtaaattagtgcgatgagtaggggaagggagcctactagggtgtagaataggaagtatgtgcctgcgttcaggcgtnctggctggttgcctcatcgggtgatgatagccaaggtggggataagtgtg

SEQ ID NO: 1605 - DNA, 292 bp, Homo sapiens
  misc_feature 252: n = A,T,C or G
acagtgatagctccccctgggcaatacaatacaagaacagtgggttttgtcaaattggaacaaggaaacagaaccacagaaataaatacattggttaacatcagattagttcaggttacttttttgtaaaagttaaagtagaggggacttctgtattatgctaactcaagtagactggaatctcctgtgttcttttttttttaaattggttttaatttttttaaattggatctatcttcttccttaacattncagttggagtatgtagcatttagcaccactggctcaatgc

SEQ ID NO: 1606 - DNA, 404 bp, Homo sapiens
  misc_feature 235, 273, 330, 336, 339, 378, 394: n = A,T,C or G
acaagctttttttttttttttttttttttttttaagaggaaaacccggtaatgatgtcggggttgagggataggaggagaatgggggataggtgtatgaacatgagggtgttttctcgtgtgaatgagggttttatgttgttaatgtggtgggtgagtgagccccattgtgttgtggtaaatatgtagagggagtatagggctgtgactagtatgttgagtcctgtaagtagganagtgatatttgatcaggagaacgtggttactagcacanagagttctcccagtaggttaatagtggggggtaaggcgaggttagcgaggcttgctngaagtnatnaaaaagctattagtgggagtagagtttgaagtccttganagaggattatgatgcnactgtgagtg

SEQ ID NO: 1607 - DNA, 277 bp, Homo sapiens
  misc_feature 80, 108, 185, 198, 208, 216, 231, 240, 261, 277: n = A,T,C or G
acaagctttttttttttttttttttttttttttttttactcggttcagtctaatcctttttgtagtcactcataggccanacttagggctaggatgatgattaataanagggatgacataactattagtggcaggttagttgtttgtagggctcatggtaggggtaaaaggagggcaatttctanatcaaataataanaaggtaatanctactaanaaaaattttatgganaaagggacncgggcgggggatatagggtcnaagccgcactcgtaan

SEQ ID NO: 1608 - DNA, 472 bp, Homo sapiens
  misc_feature 198, 368: n = A,T,C or G
acaagcttttttttttttttttttttttgccttaagacattttctcaagtgactccctttagaaagctgtagattggccagaaatgaaaatgtgcttttcagcagaagctctgagagtagtaatttcattaacttctctcaaatcaactttgtgtccttgaacaattttttttaaagtatggtatcacagcacttcanatggccatctggtgttcagtgaaagatttaaagaataatcagagctgcccaaagatgaaatatgctccgtaagaggcagtgacgtcctcatcattaggtaacctcctgataggaattgtatgatatgaattaaaatattgggtagatggtagactttgatgatattttanacctttcaagtaaatacttttatcccatgattctgtcacacttgttttgcatattagtgcatgtttctgtgattaaaaagttgaaggttatgaaaacattttct

SEQ ID NO: 1609 - DNA, 194 bp, Homo sapiens
acaaacgctacagaacgagggggacagacacgcgtggggtaagaagggcctggtgggaggagttcacagagcagacggtgcactgggaccaggagagcagaacacaggtcataactatagggcaggtggggcaggaacgggttaaaaacgagatccaagccagccagatcgcaggaggtgcgggggcgtcgtcc

SEQ ID NO: 1610 - DNA, 395 bp, Homo sapiens
  misc_feature 87, 252, 284, 315, 391: n = A,T,C or G
acaagcttttttttttttttttttttttttttgggtttatcttttttaatttggcatttgttatttgcatttatattaaagcaaagngcatcttttctttatttttcttgtttatacacattgcacaatacataaataatgatgcttataaaacgtctttatatttacaagtaataatatatttatatataacataaaatacatttttttctttaataaatctcaggttttttttcaggagtcctttctctntcaaagcactacaatgctaaatttccaatganaatgcttctcttgttcatttaaacctttgtngttagaaaaatagcttatgttaaagtctaaacatgctcattgagctaaaacagtgtcgaagtatcatacgagtgtntgag

SEQ ID NO: 1611 - DNA, 438 bp, Homo sapiens
  misc_feature 362, 393, 418, 421: n = A,T,C or G
acctcagcacacattacaaggcccctcgaatggtgctggcagcagctggaggagtggagcaccagcaactgttagacctcgcccagaagcacctcggtggcatcccatggacatatgcagaggacgctgtgcccactcttactccatgccgcttcactggcagtgagatccgccaccgtgatgatgctctaccttttgcccacgtggccattgcagtagagggtcctggctgggccagcccggacaatgtggccttgcaagtggccaatgccatcatcggccactatgactgcacttatggtggtggcgtgcacctgtccagcccactggcttcaggtgctgtggccaacaagctatgccanagtttccagaccttcagcatctgctatgcanagacgggcttgctgggtgcacactntgnctgtgaccgaatgaaaa

SEQ ID NO: 1612 - DNA, 196 bp, Homo sapiens
gtttagtgagggagagatttggtatatgattgagatgggggctagtttttgtcatgtgagaagaagcaggccggatgtcagaggggtgccttgggtaacctctgggactcagaagtgaaagggggccattcctagttttattgccatagccattatgattattaatgatgagtattgattggtagtattggttatg

SEQ ID NO: 1613 - DNA, 238 bp, Homo sapiens
  misc_feature 145, 157, 199, 206, 215, 222, 232: n = A,T,C or G
acaatttcctttagagaagtttcagaaccaagactaatttacatgaaaagctgtagagaaagtagttgaaaagtccattcataaaacttttattccacttacatgaatttaatacacgtgttcttaacaattatgcttggattgntcatgaaaattncataagacattaaacaaagctagccatcatctcaagttattnccctgtnaactatttntacagcncatgcatgtnaggcaa

SEQ ID NO: 1614 - DNA, 350 bp, Homo sapiens
acagtatattgaccttaaaaatacagtaaagcagtcatggaaataacaggtcttgtattattcatgggcacaaactgactcatggctggggaagaagcagccaccttagaccagatggacaagccagatactgcagagaagtttctgggcttttcggggaagactctagattcaattctgtaaagttatgatgcagttttctccttcctctcctctcacctcctctgagcacagctttcaacaaaaactttgcatacaaggaaatctaatatcgcagccttccccactggagggttcctggagaaggtaatataacagtggtgactgaattgaaggaggttggagagaaa

SEQ ID NO: 1615 - DNA, 517 bp, Homo sapiens
  misc_feature 409, 456, 482, 486, 488, 493: n = A,T,C or G
accattctggagggctgtccactgtatagaacatttatgaatagaaggtaaggacactctgatgattcccacgaactaggaggattggtggtaggtccttagatagagcttctaaccatgccatgtagagagcactagacacagcaccttttcgtgcaactgggagactcatgacaataatattagctgtgcttgaatgttcctttaataactcatttaacctgatctgccggtatgtcttggtcttataaagttcaagctcattatctgttattcgccatggttcatcttctttcattttatctgcaatatcttgctctttatcatcttcatgaagtctgtatggctcaatgatttcctcaaaagctataatattttctttctttggtttggtattgatatctcctanaaccatgatatcagaaaagtctatccggaacttgctaagcaaagtanccatcgctctccggacatggactatnctgntnatctntccaccaatgaatactctgatctt

SEQ ID NO: 1616 - DNA, 154 bp, Homo sapiens
  misc_feature 152: n = A,T,C or G
acattcagaatttttattttaaaacaaagaaccagagtaacaatagaaaatccatatggaaatattcacaatcttctcagtgagaaatgggaccctgccttactgccaacctactgtttgaggagccagaagttgacatgaagttgcaaggnca

SEQ ID NO: 1617 - DNA, 631 bp, Homo sapiens
  misc_feature 591: n = A,T,C or G
acttgccgtgccggggatcacactttaccatctggttggcaggctcaaagcaggcattggtgatctctgccaccgacagctgctcgtggtatgccttttctgcagagatgactggtgcataggtggccagggggaagtggatgcgagggtagggcaccaggttggtctggaactctgtcaggtccacattgagggccccgtcaaagcgcagagaagctgtgatggaggagacaatttggctaatgaggcgattgaggttggtgtaggttgggcgctcgatgtctaggttgcggcggcagatgtcatagattgcttcgttgtccaccatgaaggcacagtctgagtgctccagggtggtgtgggtggtcaggatagagttgtagggctcgaccacggctgtagacacctggggggctgggtagatggagaattccagcttggatttcttgccatagtcaacagagagccgctccatcaggagtgaggtgaagccagagccagtgcccccaccaaagctgtggaacaccaggaagccctgaagtcctgtgcactggtcagacagcttgcggatccgatccagcactgggtcantgatctccttgccaatggtatagtgaccacgggcatagtt

SEQ ID NO: 1618 - DNA, 204 bp, Homo sapiens
acaattaggtatctgactttacaagtttgttatcctttctaatttttactgaactgaaagcacaaagaagactacacagaaaatctggaaacagttgcaggtgttgggaggaagatgaaatcgagctgtcttttaacttttgtatgtgttttatcagaatttgctggactatgctggcaaggactttgtttacgatcaaattgt

SEQ ID NO: 1619 - DNA, 419 bp, Homo sapiens
acctgtatagccttcagctgattactgcagcaggcctgggagagcacatatggaggagtgtttccccctggttgataaaagcacaggaaagaattgcctggtcactcacaggctatgagggatgggatggaggaccccaggcatacactccaatctcagggccctctgctttttgagtcactttttggagcctacacaaagacacatgtgccttgctctcaaaatgcccacctgttacttgaccagctgcttctaagggtatgacctttaggggaaatccacttccctactttttaatctctgacaaatgataacttcttttccatctttcaaaattcctacatgctgccatttttctagccactgtggcactttctgactctcctccccaccttcaggaccctcctccccctggcatc

SEQ ID NO: 1620 - DNA, 165 bp, Homo sapiens
  misc_feature 5, 21, 26, 32, 39, 56, 67, 68, 73, 86, 131, 146, 149: n = A,T,C or G
accangcctgtggccctgcanaagancccacntgcaaanccagctcctcccagcanaacaacacagnnctggnggaaggctgcttntgtcctgagggcaccatgaactacgctcctggctttgatgtctgngtgaagacctgcggntgngtgggacctgactatg

SEQ ID NO: 1621 - DNA, 230 bp, Homo sapiens
  misc_feature 193, 194, 225, 226: n = A,T,C or G
actatatacatttagtatatcgccccctacaggaagtctgaaatacattttagaaaattttataatcaaaaaaaaggatgaatgatttattttatttatctgacaaaaattcagccctaggctattgacagctgcagttctcctatccacttccacataatttttaaaatgtgaatgccaggaatggtgctgnngatatgaatattaggacaaggagcagacgtnncatc

SEQ ID NO: 1622 - DNA, 266 bp, Homo sapiens
  misc_feature 187, 196, 229, 256: n = A,T,C or G
actaacagggagtttccacagggaaaaattctcttttaaaaaattaacagtaaaaataggagttacttactatctagatgaacacaattggttttcacaaaagcttttgctgctgtctggactcaccatgcttttttcttgagagaaacataccaaactttttgttgttgttgttgagacggagttncgctcttgntgcccaggctagagtgcaatggcgtgatctcanctcactgcaacctctgcctcccggatncaagcgactc

SEQ ID NO: 1623 - DNA, 112 bp, Homo sapiens
  misc_feature 41, 71, 81, 85, 99: n = A,T,C or G
gtgtggtggtgggtgcctcattgtgttgtggtaaatatgtngagggagtatagggctgtgactagtatgtngagtcctgtnagtnggagagtgatattntgatcaggagaac

SEQ ID NO: 1624 - DNA, 130 bp, Homo sapiens
  misc_feature 96: n = A,T,C or G
acctgagccccgggaccccccagctagaattctcagccttcggagcattcggcaagcccagcaggctctccacagcggaggccaaggctgcgactncaccaaaggccacgatggccccgaggcatctctc

SEQ ID NO: 1625 - DNA, 271 bp, Homo sapiens
acggccagggctattggttgaatgagtaggctgatggtttcgataataactagtatggggataaggggtgtaggtgtgccttgtggtaagaagtgggctagggcatttttaatcttagagcgaaagcctataatcactgcgcccgctcataaggggatggccatggctaggtttatagatagttgggtggttggtgtaaatgagtgaggcaggagtccgaggaggttagttgtggcaataaaaatgattaaggatactagtataagagatc

SEQ ID NO: 1626 - DNA, 145 bp, Homo sapiens
  misc_feature 106: n = A,T,C or G
gttactctgtcccacgtccaatcatgggccacaaggcacagtcttctgagcgagtgctctcactgtattagagcgccagctccttggggcagggcctgggcctcantgcttttgctttccctgaagccctagtagctggcgccca

SEQ ID NO: 1627 - DNA, 253 bp, Homo sapiens
  misc_feature 196, 203, 224, 239, 244: n = A,T,C or G
acagtgaccctaaatctttggaaacatctgcttttgtcaagtcctacaagaaccttgctttctactggattctgaaagctggtcatatggttccttctgaccaaggggacatggctctgaagatgatgagactggtgactcagcaagaataggatggatggggctggagatgagctggtttggccttggggcacanagctganctgaggccgctgaagctgtangaagcgccattcttncctgnatctaactg

SEQ ID NO: 1628 - DNA, 181 bp, Homo sapiens
  misc_feature 140, 165, 169: n = A,T,C or G
acaagcttttttttttttttttttttttttttttttacacaatatatgattttattaataaatagtgcaaaagcatcagtgataactgtttgaacattaaattttttaaacagccatgtcttggcattagttaatattgngcatattggcctctatggcactacntgtnaacagatgaaaa

SEQ ID NO: 1629 - DNA, 193 bp, Homo sapiens
acgatgtctagtgatgagtttgctaatacaatgccagtcaggccacctacggtgaaaagaaagatgaatcctagggctcagagcactgcagcagatcatttcatattgcttccgtggagtgtggcgagtcagctaaatactttgacgccggtggggatagcgatgattatggtagcggaggtgaaatatgctc

SEQ ID NO: 1630 - DNA, 507 bp, Homo sapiens
  misc_feature 74, 76, 119, 130, 132, 152, 162, 171, 173, 195, 199, 226,233, 241, 284, 290, 314, 372, 416, 449, 452, 454, 461, 497: n = A,T,C or G
acaagcttttttttttttttttttttttttttttcttttttttttttttttaatcaacatttattttatttcancnctttaaagatctcatcccactgtcttctgggcttaatgatctntgatgaaaagngngctagtatttaatgtattgntcctctctgngtaataagngngtcttttttctctgactgctgncaanatcttcagcaggttgaaaatgatgtcncttggcncagttctntttgattttattgtttttggtttactaaacttcttgagtttgnaaatgngggtctttcattatagggtttaanctttcaaatattttttcaaaaatttttttctgctcatcctcttcttttcttttcttcngggacttcaattacttacatgattcacttttcaaaaaacatccncaggtctccaaggatatacttatttattttatngancncttctcncttcttcaaattgccatattttcatacatttttctntgcattacca

SEQ ID NO: 1631 - DNA, 201 bp, Homo sapiens
gttaccctagggataacagcgcaatcctattctagagtccatatcaacaatagggtttacgacctcgatgttggatcaggacatcccgatggtgcagccgctattaaaggttcgtttgttcaacgattaaagtcctacgtgatctgagttcagaccggagtaatccaggtcggtttctatctacttcaaattcctccctgt

SEQ ID NO: 1632 - DNA, 361 bp, Homo sapiens
  misc_feature 323, 342, 346, 349, 350: n = A,T,C or G
acaaagcagcaactgcaatactcaaggttaaaacattagaaaagcatttgtgtgacaggtatattacagtattatcaaaatattacattttcagacttacttagcagataatcatccaccagagcttaaatctttaaattatttccatagtcttaaaaaatatgtaatgtcagaatgcatataaaaagaatgtaaaaggaaacctaaaatacaaatggaataatgtaacaaataaatatttgatttcagtaactgttaataatcagctcaacaccaccattctctctaaactcaatttaattcttataggaataatgaactgncaaatgccatggcataatnattnatnnccaagctatca

SEQ ID NO: 1633 - DNA, 160 bp, Homo sapiens
  misc_feature 59, 122, 132, 150, 153: n = A,T,C or G
cacggatctagatgccagtaaaatccgttctggctactttgatgagaggtatgtattgncctctagagtcagaactggccgaagcatccgaggactcagtctgcctccagcttgcactcgancagagcgacnagaggtggaacgtgttgnggnggatgca

SEQ ID NO: 1634 - DNA, 191 bp, Homo sapiens
  misc_feature 176: n = A,T,C or G
actgtgtggtttctaggttgaaattctaaatacaacataaaactctttaaatagttgtaaacaaaaatgcaaaatctgtagtcataaaaatattttattggtaattttacatagtataagtggggctatacttttttcctttcaggatactgagaaatgtgtaaactggcagctgngtctgaaaatagggt

SEQ ID NO: 1635 - DNA, 142 bp, Homo sapiens
  misc_feature 57, 65, 69, 95, 111, 112, 116, 117, 120: n = A,T,C or G
acaagctttttttttttttttttttttttttttttttttttttttttttttttaaanaaagcatntacnttttaatggaaaaccagttttacagngaccaggtaactcggnntggnnttntcacttaaaaatttttcctaaa

SEQ ID NO: 1636 - DNA, 275 bp, Homo sapiens
  misc_feature 251, 261: n = A,T,C or G
acagcgacgtggtgatgtagaggcgcttcccatccaggctgagctggatcatctgagggcctccagccacccgttttcccttgaccactaggggctctggctgggactttagttcctcgtcctccagcacttgcacagggcctcccttaacaatgctgcctccgaggaagagctgtcctgtgaggcggggtctctgtgggtcagagatgtcatactgcctcaggtccccatgcagccagttgctgaagtanaggaagcggncgaccagggagagc

SEQ ID NO: 1637 - DNA, 421 bp, Homo sapiens
  misc_feature 403: n = A,T,C or G
acaaatctggggtttggccattaaaagttatttacaacagtgggggaaaaaaagacaagaagttgtttcacattacagacctccccccaccccaaagcctaatacttgcttaccaagtcaaaaaagagacacagttgattcacaggctggaggtttgaacttgagtaagacatttataaaaacctagacggggcagtgtcctccccagcccaggtgccactaggcacagcacaagagactaaaaacaacaggggaaggctggacactcaaggtttgggagtataagcaccccacttctggctcagggatttggggagtagggtaaacaaaacctacttggaaaagaattggggaagaaaaccaacaactgccttatgcaggggtggggacagggaaggaggtngggccagggacaggagca

SEQ ID NO: 1638 - DNA, 273 bp, Homo sapiens
acttctttcatcaatcaaaaagttaacacgcttttattgctattcaagtagcaaaggaaaactactctcacaaacttcagttcaacagagaagaatcaccattaagattgagatatggaattgactaaaaccgaagtctccatacacgttatcaatggagcaactttcctgtgtgctttcaaattaatgaaatcgtgaaagaaaagtcaccattcgccattgtgatgttaatgtgtcattgaagatttcagttactacactaggcactgaagt

SEQ ID NO: 1639 - DNA, 456 bp, Homo sapiens
actgacttctgaatttggttgtggttttatgtaactaattgcaagactggttctttcactttaatagtgtcagaaagtttctgatgaaggggatagtcctctctggtttgctcaaattatatgtaaacccactcttttacttttgagaagttgaattaaagagttttatttaggccgggcatggtggctcacacctgtaatcccagcactttgggaggccgaggcgggcagatcacacttgaggtcaggggatcgagaccagcctggccaacacagtgaaaccctgtctctactaaaaaaaaaaaaccaaaaattagctaggcatggtggcgtgcacctgtaatcccagctactcaggaggctgaggcaggagaattgcttgaacccggggggcagagggtgcagtgagccgaaattttgccactgcactccagcctggtgacacagcgagactcc

SEQ ID NO: 1640 - DNA, 311 bp, Homo sapiens
acctgccccttattgggcaatcctcatgcaggattcctccaaatacccaccagctggctagtgctggcatcattatatggcagaggcagtgaaacagtgtattagctccaggacagtgctgcaaatggcccttccagtccaggtttgccaggaagatggtcagagggccagctccctgtgtcatttgccaacttgattgaatgttttctggcatctttgctgaggaggttctcaagtgataggtcaacttatggctggtggcatgactcgtaggctcaaagactcaccacacttattgcatctatttctgt

SEQ ID NO: 1641 - DNA, 158 bp, Homo sapiens
tacaagcttttttttttttttttttttttttagaacattgctttaagttttaatgtttatttccccaagacagcctagtctgcactctacttggataaattttacaagctagttttctgctgcttctagttttaaactttaaccatgtttctgatgac

SEQ ID NO: 1642 - DNA, 144 bp, Homo sapiens
acttatttaatatccctttttaattagaaattaaaacagttaatttaattaaagagtagggttttttttcagtattcttggttaatatttaatttcaactatttatgagatgtatcttttgctctctcttgctctcttatttgt

SEQ ID NO: 1643 - DNA, 420 bp, Homo sapiens
acaatttaaaaataagtctatgttttcacattgattttaaaaaatatagcatgtttgaattacaaatgattaagcaaactctattacttcatagctgaccatcttccagaaaattcccacttaattgaatacttagaaaaaaatggccagtggccgattgaaaggtatattaaaattaagggcagttttaattctgaagacaaatatcttcatggaaatctatttgtaagcttctgagattgctgctgaaagtctacagtctgtgaatataccaattcccctttacaactgatgcagatcattatgaaatactggaaggcataccctacaatttaggaattggtgtggctgccactgctatgctctcaattgcacactcatcagttcctctgcggatccggaagtagccattctcacccc

SEQ ID NO: 1644 - DNA, 270 bp, Homo sapiens
acgatgtctagtgatgagtttgctaatacaatgccagtcaggccacctacggtgaaaagaaagatgaatcctagggctcagagcactgcagcagatcatttcatattgcttccgtggagtgtggcgagtcagctaaatactttgacgccggtggggatagcgatgattatggtagcggaggtgaaatatgctcgtgtgtctacgtctattcctactgtaaatatatggtgtgctcacacgataaaccctaggaagccaatggatatcata

SEQ ID NO: 1645 - DNA, 296 bp, Homo sapiens
  misc_feature 163, 211: n = A,T,C or G
acccagacaggatcatgaacacgtttagtgtggtgccttcgcccaaagtgtcagacacagtggtggagccctacaacgccaccctctcagtccaccagctcgtagaaaacacagacgagacctactgcattgataacgaagctctctacgacatttgcttcanaaccctaaagctgaccacgcccacctatggtgacctgaaccacctggngtctgctaccatgagtggggtcaccacctgcctgcgcttcccaggccagctcaatgctgacctgcggaagctggctgtgaacatg

SEQ ID NO: 1646 - DNA, 323 bp, Homo sapiens
  misc_feature 302: n = A,T,C or G
actttgtaagtcgtttgcgagaatgcagaccacctcactaaactgtaaacggtaaagagatttttacttttggtctccgtgagtcgcatctctactaaggtttacacaggaattccacctgaagacttgtgttaaagttctacagcgcgcactgttaactgaacgtctttttcttcagcctatacgcggatccttgttttgagctctcagaatcactcagacaacattttgtaactgctgctgttgctttctacatacaccttataaagtgacatttcaaaagaaataaggtgccacagttntaaaccagaaggtggcactct

SEQ ID NO: 1647 - DNA, 242 bp, Homo sapiens
  misc_feature 191, 207, 233: n = A,T,C or G
accttattatcctacatcgcaaatttcaacagctacattatatttccttctgacacttggaaggtattgaaatttctagaaatgtatccttctcacaaagtagagaccaagagaaaaactcattgattgggtttctacttctttcaaggactcaggaaatttcactttgaactgaggccaagtgagctgtnaagataacccacactnaaactaaaggctaagaatataggctngatgggaaa

SEQ ID NO: 1648 - DNA, 491 bp, Homo sapiens
acgagaagcacagtccctaatttctgctgctatagaaccagataagaaagaagaaaaaagaaggcattcaagatcaagatcacgttctaggaggaggaggactccctcatcttctagacacaggcggtcaagaagcagatcgagacggcggtcacattctaagtctaggagtcggcgacgatccaaaagcccaaggcggagaagatctcattccagagaaagaggtagaaggtcaaggagcacatcaaaaacaagagacaaaaagaaagaagacaaagaaaagaaacgttctaaaacaccgccaaaaagttacagcacagccagacgttctagaagtgcaagcagagagagacgacgacgaagaagcaggagtggcacaagatctcctaaaaagcctcggtctcctaaaagaaaattgtcccgctcaccatcccctaggagacataaaaaggagaagaagaaagataaagacaaagaaagaagtagggatg

SEQ ID NO: 1649 - DNA, 445 bp, Homo sapiens
  misc_feature 85, 119, 127, 160, 179, 238, 294, 311, 405, 445: n = A,T,C or G
gtacaagctttttttttttttttttttttttttttctgggcaaaactgcttttctggattgtttattatgtttaatcagcattgnggaaaatgcaacaatatctgttcatggacttganaaccccanagtgggaacagcaggtgcggatgtggggagaanaaaggaggagggtctgganagcggccataggggaggcaagtgtgaggagccaggagtgggggccctgggctgccctanacagggacatgcgggcaccccgtggggtctttggcggctcacaggacaatggcagnggaggtctgctccctanagggcgaagggggcactgaattctcccccagtagcctcttctctgatccttcctcattcaggggctgggagctctggccacacaagtttcgaanacctactcccaaggaaaccaaggacacaatgaccttcaan

SEQ ID NO: 1650 - DNA, 350 bp, Homo sapiens
actgagcatggactgcagggttgctaggatacttggagtctctgaagagatgaggaggaacatgggggtgagctcaggcctggaactcattaccttgcctcacggacaccagctgcgcctggacataattgaaagacacaacacaatggccatcggcattgcagtggacattctgggatgcacgggcactttggaggaccgagcggccactctgagtaagatcatccaggtggcggtggaactgaaggattccatgggggacctctattccttctcagctctcatgaaagccctggaaatgccacagatcacaaggttagaaaagacgtggactgctctgcggcaccagt

SEQ ID NO: 1651 - DNA, 139 bp, Homo sapiens
  misc_feature 135: n = A,T,C or G
accctctaaaggcactagctgccattaaatgctccctgagtgccacagggagcaggagttacgttctctgggcattagccttggggaaaagcctgctatgccagtaatcagggttatcaaaggcagagtctgtancctc

SEQ ID NO: 1652 - DNA, 236 bp, Homo sapiens
  misc_feature 213, 220: n = A,T,C or G
accagcatgtaaaagatcattctaaagaaatgtttaccctggttcctgttctctaaaagcctttagtgtatttggggaatcaaagagttcaacaaatacctactgaatatccatttctatgtattagatttgaaccaaaactgaacaagatgtcagccttgttcttaagaagctcacaaaccaacaggactcatatccatcaggcatacattnatagggngccttccatatgcacg

SEQ ID NO: 1653 - DNA, 210 bp, Homo sapiens
acagatcatcctggaagaggtccgactttcttggcacagtcatgacgatgggctcacacttgcgctcatgcagtttgtagaaccgggcgatctcgcacttgctgacctccaggccccgcttgggcatgctgcccataccccgctgcggctccttgctggtgaacgtgttcaggaagtggatgtagggaggctcctctgtgatctcaaagt

SEQ ID NO: 1654 - DNA, 360 bp, Homo sapiens
  misc_feature 339: n = A,T,C or G
cactgagcctggcccagaagcgtttttctcaaaggccctcagtgagataaattagatttggcatctcctgtcctgggccagggatctctctacaagagcccctgcccctctgttggaggcacagttttagaataaggaggaggagggagaagagaaaatgtaaaggagggagatctttcccaggccgcaccatttctgtcactcacatggacccaagataaaagaatggccaaaccctcacaacccctgatgtttgaagagttccaagttgaagggaaacaaagaagtgtttgatggtgccagagaggggctgctctccagaaagctaaaatgtaattncttttttcctctgagttctgt

SEQ ID NO: 1655 - DNA, 122 bp, Homo sapiens
acaaattagcctgcatattcaggaatggaacaaccagtaaactgttacttgaagaactaatttaaatgatccatttaagagaaatgcagtcaaaataaggcaataaccatcagcctatctgt

SEQ ID NO: 1656 - DNA, 464 bp, Homo sapiens
  misc_feature 211, 453, 454: n = A,T,C or G
actgtctctcttcaatcaggaagagggtgttgttcagcgccggagtgacagggaccttatgggcactggccaggttgaaggcgtcattaatgatctgtgcccgattgatgacagggatggccgagtggtctctctgcagctgagtctgaatcttcctccagttctcttcgtcgtagttcacccggtaatagcccgtcacattgaggttcancaggacccactcattgcctgatgtgctgaagagatcgttctgggctcttacatctatcagccagtagtcctgctgctgtctgccatctctgatggatgtgatgggcacaatccacacgtagttgaattctgaggggcgggtaacattggaatcggggtcaaggaggaagtgctcctgggaaagggtccccgtgctggtatccaccgtgatgaccgggaagcccatctgcagggtccagcggnncatgatgtcc

SEQ ID NO: 1657 - DNA, 473 bp, Homo sapiens
  misc_feature 461: n = A,T,C or G
acctgtgggtttattacctatgggtttatatcctcaaatacgacattctagtcaaagtcttggtaatataaccaatgttttcaaatgtattctgtcatacaaagagcagatttttattgaacttgtgcaataactatattaccatacaatataaatattcatgaatagtttcccaagtctggagcgaccacatagggagaaaatgtaaatgtctcaatttttgttcacaaaagtatattttatcaaattgctgtaagctgtggatagcttaaaagaaaaaaagtttcctgaaatctgggaaacaagacatttaaagaatcagcaaaatttcaaataaaaaattatgaaaatattatcctcattagttcatttagtcccatgaaattaattattttctctgcttgatcttggtggacagtttcatgaagctgtcagttagttcattaaagttttggaaattntcagacagtgca

SEQ ID NO: 1658 - DNA, 314 bp, Homo sapiens
  misc_feature 294: n = A,T,C or G
tgcggctgctctatgctgtgaatacccactgccacgcggaccacattacaggctcggggctgctccgttccctcctccctggctgccagtctgtcatctcccgccttagtggggcccaggctgacttacacattgaggatggagactccatccgcttcgggcgcttcgcgcttggagaccagggccagccctggccacaccccaggctgtgtcaccttcgtcctgaatgaccacagcatggccttcactggagatgccctgttgatccgtgggtatgggcggacagacttccancaaggctgagccaagacctt

SEQ ID NO: 1659 - DNA, 425 bp, Homo sapiens
actttttattcaatgtaatcagaagctgtgatgttttgcctttgtagtcctgtgctttgttactgtaatttttttttttttacgaagcacgtgactggactaatgtaaggcagatgacgtgatctttaagactgctatatatatcagtctcttactctataaggttttaaattagaataagcttttatcaaatagataattgatgcaatttaggattcacgcaagtttcagtgtcaaatggcggtcttatagtttcaattctgaaaatagcaaacttaataaacagccactttaaacttgttctggcaaaccagaccctgctgtagatatagtctaaggtagttaaccatataagccttttcaactcttaatgccctccacatgaatcagcagttaagaaggttctagaacccatgaaagctttt

SEQ ID NO: 1660 - DNA, 72 bp, Homo sapiens
  misc_feature 61, 67: n = A,T,C or G
acaagcttttttttttttttttttttttttttttttttttttttttttttttttttttttnaaaaantcatg

SEQ ID NO: 1661 - DNA, 386 bp, Homo sapiens
ggggttcagagcctggcagaattgtcagctttagtctgacataatctaagggtatggagcaaggatcacatctaatgcttgtgttccttatactctattatatagtgttattcatgattcagctgatcttaacaaaattcgtagcagtggaaccttgaaatgcatgtggctagatttatgctaaaatgattctcagttagcattttagtaacacttcaaaggttttttttgtttgttttctagacttaataaaagcttaggattaattagaagaagcaatctagttaaatttcccatttgtattttattttcttgaatacttttttcatagttatttgtttaaaaagatttaaaaatcattgcactttggtcagaaaaataataaa

SEQ ID NO: 1662 - DNA, 261 bp, Homo sapiens
  misc_feature 213, 259, 260: n = A,T,C or G
acaaccaaggaaagcatcactactaaattagcaaggcttttataataaacattgaaacaagatttcctttcaaagtgtaaacttacatctattactacacacacaatgcatatatttatagaaagcaaaaagagctatctgaatatgtaatcatgcttaaatgctgagctatcaaattcacttttcagtggccccttttcatctctatctggntcctactttctgcctctatgaaaaagcaaaataaagctcaacactnnc

SEQ ID NO: 1663 - DNA, 346 bp, Homo sapiens
  misc_feature 28, 93, 299, 333, 339, 346: n = A,T,C or G
cttttttttttttttttttttttttggnggtaaaatgcaaatgttttaaaatatgtttattttgtatgttttacaatgaatacttcagcaaanaaaataattataatttcaaaatgcaatccctggatttgataaatatcctttataatcgattacactaatcaatatctagaaatatacatagacaaagttagctaatgaataaaataagtaaaatgactacataaactcaatttcagggatgagggatcatgcatgatcagttaagtcactctgccactttttaaaataatacgatncacatttgcttcaatcacataaacattcattgcnggagtnacacggn

SEQ ID NO: 1664 - DNA, 245 bp, Homo sapiens
  misc_feature 204: n = A,T,C or G
acagaaagtcacaaaccagacaaggaggggttacttttagtccagacaagtgactccaagctgagtctttagatacagaaactggaactacgttggcagtattcagtttgacattaagggctgtttgtgaacagctggactagtcggcccttcccataccctcagtaaccatcagcaatggtatggaggaggggaatagcaggnatcctactgctcatcttgacctaacctacaagatgaaaagc

SEQ ID NO: 1665 - DNA, 259 bp, Homo sapiens
  misc_feature 242, 254: n = A,T,C or G
actttatttttgaaaagggaagagatgttgtgtggggtggcaatagcattgtgccattttgtcatagaatgtaaaaattggttaactttacaaatgtcagctagttttgactactaattgggggaaattttagataatttttaaattcaaagttatttataaaatgctagaatttgttttaattttttgtattttgagccacttcacatgaagactcagttgcatttttatcgaatacattnttatcaacagtnaaaga

SEQ ID NO: 1666 - DNA, 405 bp, Homo sapiens
accagtccaataccatcctgcgtcacctgggccgcacccttgggctctatgggaaggaccagcaggaggcagccctggtggacatggtgaatgacggcgtggaggacctccgctgcaaatacatctccctcatctacaccaactatgaggcgggcaaggatgactatgtgaaggcactgcccgggcaactgaagccttttgagaccctgctgtcccagaaccagggaggcaagaccttcattgtgggagaccagatctccttcgctgactacaacctgctggacttactgctgatccatgaggtcctagcccctggctgcctggatgcgttccccctgctctcagcatatgtggggcgcctcagtgcccggcccaagctcaaggccttcctggcctcccctgagt

SEQ ID NO: 1667 - DNA, 261 bp, Homo sapiens
  misc_feature 73: n = A,T,C or G
acaagcttttttttttttttttttttttttttaaagtttaaacaccttttatttgaagaaatattgcttctanactttcctgaagccagaattgttctataaaagtatcatggaatattatacatgattaaaaaacagagtatgcttcctaataacttgaaatctttttacaaagcacattattcatgatcataaatatgtttgttctgtcatcccaccgatgatacacacatcaggcaagcagctaatttgaacatatgt

SEQ ID NO: 1668 - DNA, 542 bp, Homo sapiens
ttataattctgcaatcctcttgctcaggaagtgtatacaacttttttaaaaattatacttgttattattctacttctctcttctatgacaactctagtgcaatattagagtttcatttattccacaatatatttttactgtttttttctatttatctggctttactagtagttcttttagattaacatccagttcattttctggaaatatacctggaatttagtccatttcctaatgaaaaacagctcaaattttagggtaactaatttgtaaagagttaacattatatttggatccaattttcctgagatattgaaatagtgaaatcaccaaataaatgatatgaatcatttaactatacaaatgtatagttaatgctaacatgtatttattttcatatatgttgatcctgagtgaaatttaatttgcagaatgctttatgagttatgattactggcaaaaccttcagagcacttgtgacacatcattataatatccagtagctaacattagatctagcttattatttcagaaattaattt

SEQ ID NO: 1669 - DNA, 416 bp, Homo sapiens
  misc_feature 339, 380, 384, 416: n = A,T,C or G
gccactaataaattgtttgccaaatccttgtaataacatcttaattttagacaatcatgtcactgtttttaatgtttatttttttgtgtgtgttgcgtgtatcatgtatttatttgttggcaaactattgtttgttgattaaaatagcactgttccagtcagccactactttatgacgtctgaggcacacccctttccgaatttcaaggaccaaggtgacccgacctgtgtatgagagtgccaaatggtgtttggcttttcttaacattcctttttgtttgtttgttttgtttccttcttaatgaactaaatacgaatagatgcaacttagttttttgnaatactgaaatcgattcaattgtataaacgattataatttncttnatggaagcatgattcttctgattaaaaactgn

SEQ ID NO: 1670 - DNA, 425 bp, Homo sapiens
  misc_feature 7, 9, 13, 17, 20, 44, 45, 59, 126, 128, 136, 147, 153, 207,226, 337, 339, 359: n = A,T,C or G
gagcggncncccnggcnggnactaggcatctcaagaatggtatnnccctacaccttttntagtcccgcttgacgtctctcaatcaaactgcaaaagagccttgacctgccattaaaaataataatnancagaatgncattgccaaanattatnataggtgtttaaaagcaagataagacttcttaaagggctccaaagcatttgctngttatctatgtttttttancccaaagccaaaacaaaaaataatgcctttgtgccagacgttttgctgggcacttccatctatgtctcaaccttaggaggtataatgtatacatgcacagttttacaattngncaatggcacagatacttganacatataaattggatgatcacagagatattgaggtaaatatctgggcttggaatcaaaggaccctg

SEQ ID NO: 1671 - DNA, 499 bp, Homo sapiens
cgatgagtttgggacttcaggaaaaatcaacccagcaccagcagctaccaaccaccattccatctcttcacttgaacagcattagttaagtccagatgtgggaacccttctcttggaagaagttcctaattgtgtctcagaccggtgtaaacaaaccagccagccgccaccttgctaaacctataagctttttaaaatccaatatattctgccaagaatatgccttgatagttagccctcagcccataggtgttttttgttttttaacagaattatatatgtctgggggtgaaaaaacccttgcattccaaaggtccatactggttacttggtttcattgccaccacttagtggatgttcagtttagaaccattttgtctgctccctctggaagccttgcgcagagcttactttgtaattgttggagaataactgctgaatttttagctgttttgagttgattcgcaccactgcaccacaactcaatatgaaaactatt

SEQ ID NO: 1672 - DNA, 495 bp, Homo sapiens
acagctaggctcagcagcaaaagtgaagaataagaatgaaaggtgaaaagctgacagatgccacgcagagcaaggacttccatgaaggtccgtgtcctgtgtgccaaacacagtcaacattccatcattttctcattgctcttaaacgagcaaaaccaaattctttttctatttaaagaaatattaaatctttattttccccaacataatttgtgatcaggtaaggcaaagataagtccaccatcactggggacagcagcaacatacagacttcagaaatagccctgaatcatcagtaacattctatcgtggtaacatcagaaggaatgcagctaacaaattaaatttgtaatgttgtcacattattctaatttatttgattagtttatctggaaaaactttataaatacattatgtaagagggcagtaaattattttcttgctttgaaaaaataatgttttttcacattttaaaacattttagtctgcttttgc

SEQ ID NO: 1673 - DNA, 337 bp, Homo sapiens
aagccgtgcgttgcgttccaaggcatctgtgagcccgcggagtatacaccatgagcaaagctcaccctcccgagttgaaaaatgaaattaaatggtggcagacatgtccaaggaatattgcggggatttgatccctttatgaaccttgtgatagatgaatgtgtggagatggcgactagtggacaacagaacaatattggaatggtggtaatacgaggaaatagtatcatcatgttagaagccttggaacgagtataaataatggctgttcagcagagaaacccatgtcctctctccatagggcctgttttactatgatgtaaaaattaggtcatgt

SEQ ID NO: 1674 - DNA, 348 bp, Homo sapiens
acatacaaagtagtaaattatgagttttgacaaaagtaatagacatttttagttatttaaataaattaaggaaacatcccaaaagacatttatacagtaaaaaaaaaagtaaataatttcaggaaaaataaactgtattattacatttaaataaacatgaaaaagatacttggatgatggttttaatttctccaatagtcttcatgaaggttttgtagctgatggcaatggagcttttcctttccacttagcagccttttccattttcatcctttcctggtatcgtctttcaaagaaagccatatcatcctcttcaggtctccttaatgaagaaacttgactacttgt

SEQ ID NO: 1675 - DNA, 467 bp, Homo sapiens
gtttttttggcaaggtgggactgaaggtctcactaaacagtacagtagatgccaaaggctgggcaggggtaggtggtcagagcacgtgttgggaagatcagttgttgctgtgtctgtgttctcctctgctatatttaagtaattttagatatttatttttatttttgtgtttaattttattaaattaaggttattaaaaataagtttcttggattcattgaaaaccaaaaccatttttgcatgttgctcaacaagttgctctaatattggatgtttgcagataatattcaaactggagaaatttccgattgttaaaggcagttgggattggaagagataagaaaacaaattcccgagtgcctcctatgataggaggcactgggtctgatgctttcattactattatcttgtttcatcttacaacggggaaggaagattcaaatgcgcagtcttgcttcagagtcagt

SEQ ID NO: 1676 - DNA, 326 bp, Homo sapiens
  misc_feature 259, 299, 302: n = A,T,C or G
ggcgtcctcgtggaagtgacatcgtctttaaaccctgcgtggcaatccctgacgcaccgccgtgatgcccagggaagacagggcgacctggaagtccaactacttccttaagatcatccaactattggatgattatccgaaatgtttcattgtgggagcagacaatgtgggctccaagcagatgcagcagatccgcatgtcccttcgcgggaaggctgtggtgctgatgggcaagaacaccatgatgcgcaaggccatncgagggcacctggaaaacaacccagctctggagaaactgntgnctaatatacgggggaatgtgggct

SEQ ID NO: 1677 - DNA, 533 bp, Homo sapiens
gcagaacatacatactgaagaaagatgggttgcttggaatctctcttcttttgaagagaactattttgaggttttttaacagttgtaaacaaaaggaaagatatacagatacctatacacatagagatctacactgagtattttcaacgtggtgcatatcttcttatctagagatacacacagtgtctccactcgccccttcacacacacccacacccttccatacagcgtgtgaatataaatgttgtaaatgtccttgggagttcactggagttttcatattaccaaatgatgatgaaatacctgatttgtattactcctgagaagatattagaagggaatgacagttctgatgcactttggaatggcacaatcacgtaaacgcctgcatacttaagacttcttaactcatccaaagtttctaaacatgatttgaccaaaaaatagaaagtatcaaaacaatgcagcaagttaaaaaatcaaaacaaaatacttttttataatcaaagtataaacatataggaaatacatat

SEQ ID NO: 1678 - DNA, 317 bp, Homo sapiens
taccatcaaatcagatttctgtttttttgttaaaaaaaatttttttaatcagtattgtttttacaagtaatatactttgaaactcttgaactaatagtctcaaaaactctagaggacagtctgagaacacgtatttctattgttctaaataaatacatgtttttgaatagttcaatcatgaattattgactatgtcttcatcaaaagtgttaatccctctcagggtctctggtgaagaccttcaagagtttggttttttctcccaggaaattggaaggtagaattgtaaattcatagaacttcttttataatggtgt

SEQ ID NO: 1679 - DNA, 548 bp, Homo sapiens
  misc_feature 440, 533: n = A,T,C or G
acagccaacggtttcccttgggggctttgaaataacaccaccagtggtcttaaggttgaagtgtggttcagggccagtgcatattagtggacagcacttagtagctgtggaggaagatgcagagtcagaagatgaagaggaggaggatgtgaaactcttaagtatatctggaaagcggtctgcccctggaggtggtagcaaggttccacagaaaaaagtaaaacttgctgctgatgaagatgatgacgatgatgatgaagaggatgatgatgaagatgatgatgatgatgattttgatgatgaggaagctgaagaaaaagcgccagtgaagaaatctatacgagatactccagccaaaaatgcacaaaagtcaaatcagaatggaaaagactcaaaaccatcatcaacaccaagatcaaaaggacaagaatccttcaagnaaacaggaaaaaactcctaaaacaccaaaaggacctagttctgtagaagacattaaagcaaaaatgcaagcaagtatagaaaaggtggttctnttcccaagtggaagc

SEQ ID NO: 1680 - DNA, 356 bp, Homo sapiens
  misc_feature 249: n = A,T,C or G
gtcttggttgccaaacagatttgcagatcaaggagaacccaggagtttcaaagaagcgctagtaaggtctctgagatccttgcactagctacatcctcagggtaggaggaagatggcttccagaagcatgcggctgctcctattgctgagctgcctggccaaaacaggagtcctgggtgatatcatcatgagacccagctgtgctcctggatggttttaccacaagtccaattgctatggttacttcangaagctgaggaactggtctgatgccgagctcgagtgtcagtcttacggaaacggagcccacctggcatctatcctgagtttaaaggaagccagcaccatagcagagt

SEQ ID NO: 1681 - DNA, 327 bp, Homo sapiens
accattaatatatagatattactaatatggcaattagtttatatgctatttgaatatgatagtaatatgaaggaagattctcttttttccacttcattgccaacaaacagctaactctaaacaacagtaaagtgtggaataaattactttgttaattaatgtggtttgaagctttgtaggaatccaattggatggatagcagcagtggtaagagaacattccggaataattacctaaattaaggagcttgccctagaatgtaaatcaacctactatatctttttatttgaaaaagtcttggtagaaaaagcatatcaactgaactgt

SEQ ID NO: 1682 - DNA, 331 bp, Homo sapiens
caggcatctctgtatctgtttgaagctacaggaaagcgattttatttcaaaaatgttgccattttgattcctgaaacatggaagacaaaggctgactatgtgagaccaaaacttgagacctacaaaaatgctgatgttctggttgctgagtctactcctccaggtaatgatgaaccctacactgagcagatgggcaactgtggagagaagggtgaaaggatccacctcactcctgatttcattgcaggaaaaaagttagctgaatatggaccacaaggtagggcatttgtccatgagtgggctcatctacgatggggagtatttgacgagt

SEQ ID NO: 1683 - DNA, 163 bp, Homo sapiens
actataatttgcccttaaaaatttgtcaggagtttagatctcatgttattttctgactatagttaaaaaagtgaaagacatttgggggaaacattaaattttttccataagtggaaattcttatcaatggcctaaagatctaagatcaattgctggaagtagt

SEQ ID NO: 1684 - DNA, 518 bp, Homo sapiens
  misc_feature 509: n = A,T,C or G
acaattgctacagccaagtcacatatttcactttgtgacaagtaggtaggacaaatgaagtgtatatagtaacaagattaacagagtctatagtgaaaagcaagccagaagcagctcaggagaagcatggcttttcctagtcgtgagacccacaagaagttttatctgtggatcctcagtttattagggcactgtgatgttaagggccgcagccaaagcagcaaccgtatagtaatcataacaacaagtttaatatagggctaattacttccttcactgtaagccaaaggagtaacaccacagcattgttcaggaaaggcaattatacagggacccaaaaaatgcgggcctagcaattagctcttgagcttgccccagaggtaaaatttggagtgaatggattgcatgtccttcaggctgtttcctaggacccgtatttcttacatataaatttgttataaaaactgaacagtagagagttccaagactaggaagaccctgatgttccnaaagtcagt

SEQ ID NO: 1685 - DNA, 221 bp, Homo sapiens
acgcttattgatctcatcctcatacttgttcttgaagtcctccaccagcccctgcatgttgccaagctccgcctccagcttcagcttctcctggcccagagtctccagctgccgcctaaggttgttgatgtagctctcgaacatgttgtccatgttgcttcgagccgtcttctgctgctgcaggaggctccacttggtctccagcatcttgttctgctgct

SEQ ID NO: 1686 - DNA, 279 bp, Homo sapiens
  misc_feature 244: n = A,T,C or G
acaagcttttttttttttttttttttttttttatgagaccaggagaaataactttatttgaataggacccaagacagcatattgggctaaggaggagaggtaaggttccaaaaccgcagtcaaagctcatcaaccaaatggactctacttcccagcaaccttgcagttagtgcaaccaacaaaaggcctgctggggaatgtatttgccactaaattccccaagtatgccaacattacaaaaaanataggtttttcatcataattgaatttccacaaacc

SEQ ID NO: 1687 - DNA, 459 bp, Homo sapiens
acacagtcataatgatgtgactgcttagcccctaaatatggtaactactctgggacaatatgggaggaaaagtgaagattgtgatggtgtaagagctaaatcctcatctgtcatatccagaaatcactatataatatataataatgaaatgactaagttatgtgaggaaaaaaacagaagacattgctaaaagagttaaaagtcattgctctggagaattaggagggatggggcaggggactgttaggatgcattataaactgaaaagcctttttaaaattttatgtattaatatatgcattcacttgaaaaactaaaaaaaaaaacaataatttggaaaaacccatgaaggtaactaacggaaggaaaaactaagagaatgaaaagtatttgcctctggaaagaacaactggcaggactgttgttttcattgtaagacttttggagccatttaattgt

SEQ ID NO: 1688 - DNA, 346 bp, Homo sapiens
acaaagcagcaactgcaatactcaaggttaaaacattagaaaagcatttgtgtgacaggtatattacagtattatcaaaatattacattttcagacttacttagcagataatcatccaccagagcttaaatctttaaattatttccatagtcttaaaaaatatgtaatgtcagaatgcatataaaaagaatgtaaaaggaaacctaaaatacaaatggaataatgtaacaaataaatatttgatttcagtaactgttaataatcagctcaacaccaccattctctctaaactcaatttaattcttataggaataatgaactgtcaaatgccatggcataattattt

SEQ ID NO: 1689 - DNA, 316 bp, Homo sapiens
acccaacacagagcctggcacatagaggtgttcaataagtaacttttgtcaggagactcttagggaggaccttcagaaggccaagtgagatgacttccctagaaattctctcagggcatggggaccctggaggactccttggagcctgcagcccctggtgtgcccaaggccccagaatacaccgtgccagggctgttcacaggcgtggggggctggatgcccagggaggtgcccgcagaagctgggtagacactggaggaggtggggtttggaccaaagtggttctgcacatagcacaggccggaggcaggctggt

SEQ ID NO: 1690 - DNA, 246 bp, Homo sapiens
acagacccagaaagaacaggtagtgagtagttatggtctcagcctctccagtcttgctgatcatgaagagctggggcaggataaccactgattccagatagatagagaaagtccagaggatctccagcagagtgaaactgtagttttcaaggaaggaaaggccaatgactgggaccagaagaaactccaggcggaatgtgtcattctcactgtcaaaagttttacggaatttcccatatatcatgt

SEQ ID NO: 1691 - DNA, 434 bp, Homo sapiens
ctcgtggaaggcccgggaccgcgggatgggtgtcggcgtgaccaggcctgagctccctgtctctcctcagtgacatcgtctttaaaccctgcgtggcaatccctgacgcaccgccgtgatgcccagggaagacagggcgacctggaagtccaactacttccttaagatcatccaactattggatgattatccgaaatgtttcattgtgggagcagacaatgtgggctccaagcagatgcagcagatccgcatgtcccttcgcgggaaggctgtggtgctgatgggcaagaacaccatgatgcgcaaggccatccgagggcacctggaaaacaacccagctctggagaaactgctgcctcatatccgggggaatgtgggctttgtgttcaccaaggaggacctcactgagatcagggacatgttgctggccaata

SEQ ID NO: 1692 - DNA, 439 bp, Homo sapiens
actttgacgtggagaggaactcctgcaataacttcatctatggaggctgccggggcaataagaacagctaccgctctgaggaggcctgcatgctccgctgcttccgccagcaggagaatcctcccctgccccttggctcaaaggtggtggttctggcggggctgttcgtgatggtgttgatcctcttcctgggagcctccatggtctacctgatccgggtggcacggaggaaccaggagcgtgccctgcgcaccgtctggagctccggagatgacaaggagcagctggtgaagaacacatatgtcctgtgaccgccctgtcgccaagaggactggggaagggaggggagactatgtgtgagctttttttaatagagggattgactcggatttgagtgatcattagggctgaggtctgtttctctgggaggtaggacggc

SEQ ID NO: 1693 - DNA, 507 bp, Homo sapiens
gcagcctccccaaatccttctctgggatcccagtggacagaagcaaggtggctttgtagtggacaaaaacaccaaaatggcctacctccaaatcccaggcattgctaaggttggcacttggaaatacagtctgcaagcaagctcacaaaccttgaccctgactgtcacgtcccgtgcgtccaatgctaccctgcctccaattacagtgacttccaaaacgaacaaggacaccagcaaattccccagccctctggtagtttatgcaaatattcgccaaggagcctccccaattctcagggccagtgtcacagccctgattgaatcagtgaatggaaaaacagttaccttggaactactggataatggagcaggtgctgatgctactaaggatgacggtgtctactcaaggtatttcacaacttatgacacgaatggtagatacagtgtaaaagtgcgggctctgggaggagttaacgcagccagacggagagtgataccccagcagag

SEQ ID NO: 1694 - DNA, 357 bp, Homo sapiens; identical to SEQ ID NO: 1467

SEQ ID NO: 1695 - DNA, 402 bp, Homo sapiens
accacttttgttttgttttgttatttaaaataggaacagtgtctcactgtgttgcccaggctggtcttaaactcctggcctcaagcgatcctccttccttggcctcccgaagtgctgggattacaggtgtgagccaccaaagccggccccaccttgctttttaaaacagctctgttgaggtgtaactgacaggtaatgaactgcacatacgtgaagtgaccgatgcatttgcctgtgaagctgtcgccagaacatgtccatcaccaccaacagcagtttcacaccccggtctaaaccgtccctcgtgtcctccatgttcaggcaaccactggtctgctccctctcactaaaggttaatttatatattctagaattttatctgagtggaatcgcagagcaagt

SEQ ID NO: 1696 - DNA, 509 bp, Homo sapiens
acagggaacagatgaaccgcctctggaggaacacgtgcagtcaacaaatgaaagtctacagctggtaaaccatgaagcaaattctgtggcagtggatgttattcctcatgttgacaacccaacctttgaagaagacgaaactcctaatcaagagactgctgttcgagaaattaaatcttaaaatctgtgtaaatagaaaacttgaaccattagtaataacagaactgccaatcagggcctagtttctattaataaattggataaatttaataaaataagagtgatactgaaagtgctcagatgactaatattatgctatagttaaatggcttaaaatatttaacctgttaactttttccacaaactcattataatatttttcataggcaagtttcctctcagtagtgataacaacatttttagacattcaaaactgtcttcaagaagtcacgtttttcatttataacaattttcttataaaaacatgttgcttttaaaatgtggagtag

SEQ ID NO: 1697 - DNA, 145 bp, Homo sapiens
acacatttatccacctgggcaaaatttacaactggctgatttcccttcaacaccacaggacgagactaaaggaaggtgagtaagagtccagccatggtaaatctacagcaaaaggtaggactcaggcaaaatatgcatggcaaaa

SEQ ID NO: 1698 - DNA, 251 bp, Homo sapiens
  misc_feature 251: n = A,T,C or G
acatctgaactttggtccatcctttgatgtgtggttcgttagccacaaagagaaatatctgaaagtcaacatgatgcttcttgcatattatccagattattgtatgaagttgtgtctataattattaccaatttttattctttatttctcaaatggaaacacctgaaaaagcattctggagtgctgaatttttaagatgtatattttgttaagcatattctttaaaaaaaaaaaaaaaaaaaaaaaaaaan

SEQ ID NO: 1699 - DNA, 179 bp, Homo sapiens
acatgaacagcaggctgttgcattgtaacttgtggctgtgcattaagatgttgctgaggattgcgaactcctgcagcatatttatactgtggaacggtgcggacagcaggagtagctgcagcggctgcagctgcaggacgtggacccattgtctgtgttgatgtgttagacctgcccgg

SEQ ID NO: 1700 - DNA, 346 bp, Homo sapiens
acccttgttgaaattgtcatttatacaataaagcgaattctttatctcaaaaaaaaaaaaaaaaaaaaaaaaaagcttgtacaagaataccaggcagagtgttttacccatggaaacaggtttcagattactttatttttactgttagagtctcaagtttagaaatgctaacacttaaatcagtttttttctcactatacttgaagattgttaatattttgatatcttcctagcttgatgaatttaaacatatcttcagatctgtgacagtgacagccaataggactgataatattagcttcaaaccaataatatccagggttaaaataaaaatcatagtgaaagt

SEQ ID NO: 1701 - DNA, 557 bp, Homo sapiens
acagtgatagctccccctgggcaatacaatacaagaacagtgggttttgtcaaattggaacaaggaaacagaaccacagaaataaatacattggttaacatcagattagttcaggttacttttttgtaaaagttaaagtagaggggacttctgtattatgctaactcaagtagactggaatctcctgtgttctttttttttttaaattggttttaattttttttaattggatctatcttcttccttaacatttcagttggagtatgtagcatttagcaccactggctcaatgcgctcacctaggtgagagtgtgaccaaatcttaaagcattagtgctattatcagttaccaccatttggggcttttatccttcatgggttatgatgttctcctgatgacacatttctctgagttttgtaattccagccaaagagagaccattcactatttgatggctggctgcatgcagacatttaaagcttttagagaatacactacaccagggagtatgactactagtatgactattaggagggtaataccaagagttggacta

SEQ ID NO: 1702 - DNA, 278 bp, Homo sapiens
  misc_feature 116, 166, 178: n = A,T,C or G
aaaaaaaaaaaaaaaaaaaaaaaaaaaaagcttgtacacatgacaaggtgcggctccctaggcccctcccctcttcaaggggtctacatggcaactgtgaggaggggagattcacngtggtgggggactgagtgtggcagggactccccagcagtgagggtctctntcttcctcttgngctcttgctggggctggtggtccaggggtcttactccttggaggccatgtgggccatgaggtccaccaccctgttgctgtagccaaattcgttgtcatac

SEQ ID NO: 1703 - DNA, 465 bp, Homo sapiens
  misc_feature 43, 53, 248, 299, 365, 368, 402, 405, 416, 459: n = A,T,C or G
acaagcttttttttttttttttttttttttttttgatgcttanaaaatgctgngattttattcatagtatatacaccacaaaacagacactttccattattttgattacttcaaaatttaaaatctgcttgtttttcaattgatttttttcatgacagatgctgagttctgacccatttttttcccctgacagtatcaataggctgcccgactacatgatacaattgtttttagcatttaaatttaanactatggctcagtgtttgaaaaataaataagttaacaaaagagaaacattnttaggaggaaaatgaaaacatattcaccacatgataaaaaaaatcactccttaaaaatcaataagnggngtgagcattatttcacttaacctacttggaagcnctntaataccaatntacaaataaaacagaacccataggtagcctggaatgatacagnggccat

SEQ ID NO: 1704 - DNA, 296 bp, Homo sapiens
cgccagaacacaggtgtcgtgaaaactacccctaaaagccaaaatgggaaaggaaaagactcatatcaacattgtcgtcattggacacgtagattcgggcaagtccaccactactggccatctgatctataaatgcggtggcatcgacaaaagaaccattgaaaaatttgagaaggaggctgctgagatgggaaagggctccttcaagtatgcctgggtcttggataaactgaaagctgagcgtgaacgtggtatcaccattgatatctccttgtggaaatttgagaccagcaagt

SEQ ID NO: 1705 - DNA, 288 bp, Homo sapiens
acaattacccaccactggatttgactcagagaggacccccagagggtgtctccatcttccctatttattttcagcccttgagggcttcattgtagatcaaagccaaggcccccaggaaggtgacatactcctggaagttcacctcctggtccttgttccggtccaagtcttccatcagccttgcaatttcagcatcctgcagcttcgagccaatggtgagctccttctggatcagctccttcagctccttcttgctcagggtgtgcttgtcaccctccctgccggagt

SEQ ID NO: 1706 - DNA, 415 bp, Homo sapiens
acaaggcccctctgcaactggagagaaaattaattcctatcccgtgagtggattgtgagaaattccacccacgtggagacagcttactgcagcactgttggtgttcggagctcttctgtgccctggctccatgctttcacctacacaaacatcaccttcctaatcaccgcggggcggggagcgtgtggctgtgccccttctctttaatctcatttaatttttattaaacatgctcagtaccaaagacttatgaatagatttatgaattggagtagaaaacatagacatttctaccttgaggatatagaagggaacttaggaagtgagaagtcagattaccctagtcctctagggtgcttaaagctaactagtcccgtgaatgagaatctaacctatgtgaaaatctccagcctgt

SEQ ID NO: 1707 - DNA, 531 bp, Homo sapiens
actcctaataaaatacttaataaatagcatataaaatcaaagtttaaaagtaaatgatggcagtttgccatactaaaaagataaagaatgtctaaaattataggaagataagatattagccctcatagaacttaaacttttagaaattctgaataaggaaatatattctacatagataaggtgtgaaacactcagctttctaaagtgaaataattaaatagtatcccacaatcaagagtaaggaaattctctaacacattccccaagaaacattaaaatatttcctatttcttataaaagtgaagataacagtgtatttccatcaacagaattcttatgaaacatcatttccacattaaatccacagccttctcagttaatatcttaaggaatatttcttggaaatataatagtcacctacaattcaagacactttgaaagattaacagccagtgattcctggctcacactatagtcaattgccaaaacttcaatagcatagcagataaaataacagcaaatagcagaggt

SEQ ID NO: 1708 - DNA, 205 bp, Homo sapiens
acagtgaaaaacaaactaatataaagcattccagttgataaaaacctcctcaggcttatggtttgttttccaaggaaattatgtttcaatgtaaagtttgaaatactccagacatacattccatgtaggttttgggtgccaatgttaaaatttcaaattttgcatgcaaggcttagcaaagaaacactggcagaattttgcaaat

SEQ ID NO: 1709 - DNA, 506 bp, Homo sapiens
actttgaggtctacaagacgtatctagaaaatttactactgtggaaaatgaagactgattaaatcgaattggggggaaggggaagggcctgtggtttttctttttgattaattgctgtaacactgtccttcgggcggctgagggagtttcatattttctttagacatcattaggcgccgaagctcttgcaggacaactttgatgctatatgaattctgccattttgctagcactgatatggctcttgggtccaccactccattagaactatttactccattcatattaatttttgttacaaatcttacaaaggggggtgcttctgggtatttaggtccacattctattttaaggctgtatattcggttttcataaattgttcttggaggcccaattatcatccctgtccatcttgtaagtgtcatgtcttcgtcatcttctagaccccagctaactgtgccatctcctactcctttctggccttcttcgagttcttccaacagtcg

SEQ ID NO: 1710 - DNA, 416 bp, Homo sapiens
actcaaaaagaaatcttcagggataaaataaagtgataatttaaaagaaatcaatggattaaacatattgaaactgttctataggcagtggtcattgagtcagctttcagtgcattaggaagaagatgcataggtgtcaactcttttctgacagcatttactagagaagagaaaaagctggggactacatcttcaaggaagggactttttttggatgagcagttttgagtgtgtttgtcagttaaagagaggaattaggttggttttcatttgggaaaaattgtatatatatttaatgtaagttatcacattgcatcttaaaaatattcttatttaatacatatatttcctacatgtatatgtggtagcatgatagcaaataacatttgtttggtatttccaaaggactttcatgt

SEQ ID NO: 1711 - DNA, 472 bp, Homo sapiens
acgtcgtctttaggttggggggaggggttttatgcgatggagtttccccacactgagtgggtggagactgaagttaggccagcttggcacttgatgtaattctccttggaatttgccctttttgagtttggatcttggttcattctcaagcctcagacagtggttcaaatttttttccttccatttcaggtgtcgtgaaaactacccctaaaagccaaaatgggaaaggaaaagactcatatcaacattgtcgtcattggacacgtagattcgggcaagtccaccactactggccatctgatctataaatgcggtggcatcgacaaaagaaccattgaaaaatttgagaaggaggctgctgagatgggaaagggctccttcaagtatgcctgggtcttggataaactgaaagctgagcgtgaacgtggtatcaccattgatatctccttgtggaaatttgagaccagcaagt

SEQ ID NO: 1712 - DNA, 571 bp, Homo sapiens
acaatatattatgaagcatgaccactttattttgaaacttagcaattgtattgctggggtttattgtatctgtagcatgtcactgattatttcagttagttttataatgatttttaaaaaacatatctatttggaataagatacagcaacaatcattgctactgacttgttcaaccccttagttacactgtatgatcaacatataacaagatacagtggaatggcccatacagtatattactgttgtgtgatgattggctttggaagcagtttgattttgaaatgctttgatattctaattgacatggaacaagttttttccctgctccccaaatagaattttgtaaccaactttgctatttttttaaagtttgtaagaatgtgtcatttcttggggagtagccatccatcaacaaatatcctgactgctactttgttatatacaaaatacttacattgaacctggtggcataatgagtattttgaaagaagaaatttcttcactctcatttttatagaaatcttggaatcagcttaagctgtagcttttatgacaaaagacagtcatttt

SEQ ID NO: 1713 - DNA, 433 bp, Homo sapiens
acaattctggaataagaactattcctgctcattctttttctatgatttttttttttttactttgtgggagcccagaatttccctgggaaataagaataagatcctttaaatactgtccagaagaaaaaaaaataccaccttataacaggtctcatttgtgactgcttccaaaactgcagataaaacctcaaatcatcaaaaggtttgatttattaaaaagaaaaagtctctggtgaaatctcaagagtcccttccaccccaagcatttttcttcattaaacaagcagtcaaaaacccacttcaaactataaattgaacagcaatggaaaaataagaaattttcattcttttccaatcaatgtaatttaacataaactccagtttacttacacctaatgcaataacagcctttgttgtgtccacatttcaaaac

SEQ ID NO: 1714 - DNA, 495 bp, Homo sapiens
acacctttcccaaatgtagactagaatctgcaggatgccacccactgtatagttctgctttcccagagaggaagaacttttagaaaccaaatgatcttaattgttattgcccacccctggcttttccgggtagaaaattcacagtaggaatgattgttaagagagagtgcttggaaccatgggttaacaggaaaggctacctaacttcacatatctgcaaccagagcagccaccaagcattacttagcagcaggaaaatgattgtatttgagttcctgtgtgtccaaaactgaggcaccatgttctttgaaaacatgccacctcaaggctgggcgcggtggctcacacctgtaatcccagcactttgggaggtcgaggcgggcggatcaccggaggtcgggagtttgagaccagcctgaccaacatggagaaaccccatctctactaaaaatacaaaattagccgggcgtggtggcatgcgcctataatctcagc

SEQ ID NO: 1715 - DNA, 50 bp, Homo sapiens
acaggcagagaatggggataggtgggggaatgaggtgagaggggagatgt

SEQ ID NO: 1716 - DNA, 344 bp, Homo sapiens
cgcctcgtcctccatagcagccaagatgatgtccgcggcggccattgccaatgggggtggagttgcctcgggcagccttgtggctactctgcagtcactgggagcaactggactctccggattgaccaagttcatcctgggctccattgggtctgccattgcggctgtcattgcgaggttctactagctccctgcccctcgccctgcagggaagagaaccatgccaggggagaaggcacccagccatcctgacccagcgaggagccaactatcccaaatatacctggggtgaaatataccaaattctgcatctccagaggaaaataagaaataaagatgaattg

SEQ ID NO: 1717 - DNA, 333 bp, Homo sapiens
ccgatgtctagtgatgagtttgctaatacaatgccagtcaggccacctacggtgaaaagaaagatgaatcctagggctcagagcactgcagcagatcatttcatattgcttccgtggagtgtggcgagtcagctaaatactttgacgccggtggggatagcgatgattatggtagcggaggtgaaatatgctcgtgtgtctacgtctattcctactgtaaatatatggtgtgctcacacgataaaccctaggaagccaattgatatcatagctcagaccatacctatgtatccaaatggttctttttttccggagtagtaagttacaatatgg

SEQ ID NO: 1718 - DNA, 460 bp, Homo sapiens
acgtaattccctgagaagtgtggtttataaggagaatggtatatgggagctgaaggggttgtttaaataatggcataaagcctccaattattaagatgaaagtatgtatcaaagaaacacaaggaataatggaaatctaaggtgcctaaaaagacgagataagatgaaatccaaagcaatgaaatccaaagaattggcctcaaagtaagagaactagtctcatgtattagtggatatatcaatataatattacattactaaatatgatatttgtgtgtttagtagtgaggagttgaagatatatcatttaagggctttgctttctctgcaaagtagcaataatgtgagttgagaataagttaggggatcagaaaaatcaggatttggctttagtggcaaaggcctgaaatttttgatgacagaaccagttgtgataagagaatctttgaaaggccactgt

SEQ ID NO: 1719 - DNA, 546 bp, Homo sapiens
accatatttttaaaaggagagataaattgtaatggtttgacttctgttcatgaatacagaggaagggaattttctgattatcacagataattccatgtcagacttttgatggtcctataacattattttatctagtttctctttatttacttttgaagatgatagtatgatcctatcatgttctttgaagtgctaggaaagatttctggtgattcttacgtatttcttctttttctcctggaactaatagcttcaaattgtaaatgtccagaaaacagtgggcaatccattgaattgcacaagttgcaaactactggaccatgttagctttatgtgctaatatattagccagtgtgtcccttaatactaataaaagattatgttgtttttagaatacagaatacaaaggggaatattgggcagaacatcctacgataaaaattttttgggaagtatttcacgaattaccattggaaaagaagaaacagtttctgttatttttgacaggtagtgatcgcattcctattcttggtatgaagagtctga

SEQ ID NO: 1720 - DNA, 51 bp, Homo sapiens
  misc_feature 43: n = A,T,C or G
aagcttttttttttttttttttttttttttttgggtaattaanaatttatt

SEQ ID NO: 1721 - DNA, 329 bp, Homo sapiens
tacttgttcttgcggatcatgtgtctgatgctgctgagcgtggcgcgagcattcttgttgatggtggtccgcacataggaggtggcaggcttccgctggccggatctccgcttaatgaccaccacgacacctttgccgtcggctgccggctccacgcccacagtcttgcggtgaatcagtccgttgtagcggaaggaattgcgggccttcaagttattgggctcagtgctgtaggtctgcttattcctcttgatcaggaaactggagcagttccgcacgaccatccattgcagatgcgcagacatggcggcggctcccttcgcagcggc

SEQ ID NO: 1722 - DNA, 378 bp, Homo sapiens
  misc_feature 53, 57, 75, 81, 135, 151, 186: n = A,T,C or G
acaagcctttttttttttttttttttttttttttttactgcaccaaatttaanaacnccctttcaggcaagcagnggtctntagctgttaaaacatttccttagtggatcacaatagcttctaaaactgcctttntagtaaaggccatcanagaggtaatactaaactgtgcatttgccaaataanaatatgaattgtataaaagctcatattccaatcctagatcaaatggcaaaagttctacaaagttggtttccatgtttgtataaaagctccgactgattttatgtattttgctatgaaattacctttgggtcttataatcagtatacctctactcaggaatgtgcaaatgattttatacagcacgacgctagt

SEQ ID NO: 1723 - DNA, 480 bp, Homo sapiens
actctgaggcttgtaggagggtaaaatagagacccagtaaaattgtaataagcagtgcttgaattatttggtttcggttgttttctattagactatggtgagctcaggtgattgatactcctgatgcgagtaatacggatgtgtttaggagtgggacttctaggggatttagcggggtgatgcctgttgggggccagtgccctcctaattggggggtaggggctaggctggagtggtaaaaggctcagaaaaatcctgcgaagaaaaaaacttctgaggtaataaataggattatcccgtatcgaaggcctttttggacaggtggtgtgtggtggccttggtatgtgctttctcgtgttacatcgcgccatcattggtatatggttagtgtgttggttagtaggcctagtatgaggagcgttatggagtggaagtgaaatcacatggctaggccggaggtcattaggagggctgagaggg

SEQ ID NO: 1724 - DNA, 406 bp, Homo sapiens
accgcagtggggctgctcctcagcctggccctgcccatctcagcctcaccatcaccctgctaatgactgccagactgtggggaggcactctcctctggacctaaacctgaaatccccctctctgccctggctggatccgggggacccctttgcccttccctcggctcccagccctacagacttgctgtgtgacctcaggccagtgtgccgacctctctgggcctcagttttcccagctatgaaaacagctatctcacaaagttgtgtgaagcagaagagaaaagctggaggaaggccgtgggccaatgggagagctcttgttattattaatattgttgccgctgttgtgttgttgttattaattaatattcatattatttattttatacttacataaagattttgt

SEQ ID NO: 1725 - DNA, 466 bp, Homo sapiens
  misc_feature 58: n = A,T,C or G
acagatattgatctatatatcaaatacatacagaaatgatgtaaaaaccttatgcagnttactttgacctctgtcctcaaaagatttgcccagggacagatgcttttcttttgtataaatgactgtggctttatttaaaatatgaaaatcaaaggaagaaacccagtttaatcacagtatttttaaaatcccttcccaatattaaaggatcattaccaatatatagcaccataatacaaatattgatgggagagggtattcacatcacgcaaaattaataataataataaaaacaaacaaacactgaaaacccgtgttagtatcgtagaataagaagttgataacagctttagctttcctcatacacggcaaggaaaaggttaaagagtttaaactaccaaaagtccccaaataaatcctaacaggaaaaacaaaacaaaacaaaaacaaacccaaggtcagcagt

SEQ ID NO: 1726 - DNA, 589 bp, Homo sapiens
  misc_feature 557, 582: n = A,T,C or G
accttgaattctttgatttattttattgcatcaatgaattaaaacaaaaatcttgggggaagaaattggcaatatcgtataaaaatctgctcatattagaacacagtataattcagcagtaaacactagaatcaaatgaatagccttttgtatcagttattaatcttttctaactctgcttagctgctaataatcctgaggcatagaaattgaagaatttgtaaaaatagaattgccttaaaggatttgaagtaagaacataattttggggagagttttttagtgattcacagtatccctcttagcattaatttaaggtaaagaggcagattgattttccctctttcctggtaattcctaagtaattaagaataaataagttccaaaagaaattgtagctggaatcttaataacaattgcgagtggctgtttgagttgcccccaccatgtccttagatctaatctgtgctaccttattaactcacagcaggcttactgaatggcttcatttcagatttagttgatttctccaccaaatgcatgtcatgtattctcantaggctgtattcccagcagtcaatnaatgaac

SEQ ID NO: 1727 - DNA, 293 bp, Homo sapiens
cagaacacaggtgtcgtgaaaactacccctaaaagccaaaatgggaaaggaaaagactcatatcaacattgtcgtcattggacacgtagattcgggcaagtccaccactactggccatctgatctataaatgcggtggcatcgacaaaagaaccattgaaaaatttgagaaggaggctgctgagatgggaaagggctccttcaagtatgcctgggtcttggataaactgaaagctgagcgtgaacgtggtatcaccattgatatctccttgtggaaatttgagaccagcaagt

SEQ ID NO: 1728 - DNA, 437 bp, Homo sapiens
  misc_feature 4, 6, 25, 30, 55, 95, 117, 155, 226, 235, 238, 240, 254,259, 335, 359, 379, 389, 391, 406, 419: n = A,T,C or G
actntnacatgtggcaaaatatggnttggnttttcttttttttttttttgaaagngttttttcttcgtccttttggtttaaaaagtttcaccgtnttggtgccttttgtgtgatgcnccttgctgatggcttgacatgtgcaattgtgagggacntgctcacctctagccttaaggggggcagggagtgatgatttgggggaggctttgggagcaaaataaggaanagggctganctnancttcggttctccanaatgnaagaaaacaaaatctaaaacaaaatctgaactctcaaaagtctatttttttaactgaaaatgtaaatttataaatntattcaggagttggaatgttgtanttacctactgagtaggcggngatttttgtntnttatgaacatgcagntcattatttttgngggtctattttactttat

SEQ ID NO: 1729 - DNA, 518 bp, Homo sapiens
accttataactgatcatggtgattcatcaacaatttaaaaattacttctttctgtaagaatcatagaccttttttctccctttattgaataaggatgaggtcatagaggaaatgtcttcttttggttgattttttcctgaacattattgttctattgtattaatctgataatattggttttaaatgtaaaagatcaaaattgataaaaatatttcagcctcagttttcagcaaccttccacatacacagttcatatgagattttctattgtcctgttgtcttttaggttttttacttataaactactcttataattgtttttgtcttttctactaaaaataatttggtattcatgcattaactcaatctagagcaatgattttcccaaagaatttcatttcattctttctgtctctaaagaacaagaagggaaccaaaccacaatcagaagccagcatgaacaaaccttatttgtagagatgggttgaatttggttagatttatgtgtatatgtatat

SEQ ID NO: 1730 - DNA, 491 bp, Homo sapiens
cgaccttttgttcagaagcgaatttatttcagacttcgaaacaaagcaacagggttattcatgtcaaccaatggaaacttagaggatctgaagcttctgaggatacaggtcatggaggatgtcggggccgatgatcagatttggatctatcaagaaggatgtatcaaatgcaggatagcagaagactgctgcctgacgattgtgggcagcctggtaacatctggctccaagctaggcctggccctggaccagaatgctgacagccagttctggagcttgaagtccgatggcaggatttacagcaagttgaagccaaatttagttttagacattaaagggggcacacagtatgatcaaaatcacattatcctcaacactgtcagcaaagagaagtttacacaagtgtgggaagccatggtcctatatacctgaacaaagaaggaagaagaatcttctggaggtccttccagccaccttatttcttaaaaagg

SEQ ID NO: 1731 - DNA, 477 bp, Homo sapiens
catgaatgtggctgaccttatttaattcctgggatgagagttttggatgcagtgctcgctgttgttgaataggcgatcacaacgtgcattgtgcttctttctttgggaatatttgaatcttgtctcaatgctcataacggatcagaaatacagattttgatagcaaagcgacgttagtcgtgagctcttgtgaggaaagtcattggctttatcctctttagagttagactgttggggtgggtataaaagatggggtctgtaaaatctttctttcttagaaatttatttcctagttctgtagaaatggttgtattagatgttctctatcatttaataatatacttgtggactaaaagatataagtgctgtataaaatcagccaattatgttaaactagcatatctgcctttattgtgtttgtcattagcctgagtagaaaggcctttaaaatttttttagaaagcatttgaatgcatt

SEQ ID NO: 1732 - DNA, 534 bp, Homo sapiens
acaagactcttgacagttgtgcttctctaggaggttgggtttttttaaaaaaagaattatctgtgaaccatacgtgattaataaagatttcctttaaggcagaggctggtcgagatgctgctgttatcttctgcctcagacagacagtataagtggtcttgtttctaagattcctaccaccagttactttgggccaagtatccacatccccttgcgtatgggaggtgggtgaagagtgttggatgcaaagtggttattatgggaagtagctcgatggtaaaaggacaaacacctatctatcttagagcttaagcctgtatgtgcttattcccaagggagatagaggtgtttaatcacaaggacagcatgagttagaggacactggcatcaacagctgccacagccgtgcacaccagggccagagcagcccactgacatctgtctttggtcttgagatcaaatgcatcccattcttcatacattagaaggtcgacctccttgaagcggaccaagtatagcaagcctctaaaggac

SEQ ID NO: 1733 - DNA, 124 bp, Homo sapiens
  misc_feature 49, 54, 57, 58, 68, 94, 101, 114: n = A,T,C or G
agctttttttttttttttttttttttttttttttttttttttttttttnaaacncannaattcctttnttttgattttaaattaatcaaaaccntcgaagnggtaaaaaacagntgacaggggt

SEQ ID NO: 1734 - DNA, 465 bp, Homo sapiens
accatttatgtttctcagaaccagcagaatcagtgcctagcctgtgcccagcaaatagttggcactcaataaagatttgcagaatttaatacagatcttttcagctgttcttagggcattataaatggaaatcataacgtggttctaggttatcaaaccatggagtgatgtggagctaggattgtgagtgacctgcaggccattatcagtgcctcatccgtgcagaagtcgcagcagagagggaccatccaaatacctaagaaaacagacctagtcaggatatgaatttgtttcagctgttcccaaaggcctgggagctttttgaaaagaaagaaaaaagtgtgttggcttttttttttagaaagttagaattgtttttaccaagagtctatgtggggcttgattcacccttcatccattggctggaacatggattggggatttgatagaaaaataaaccctgct

SEQ ID NO: 1735 - DNA, 539 bp, Homo sapiens
actgaaagcatttctactaggaaagtattgccaatgtccattgctagacataatatagcaggaacaacacattcaggtgctgaaaaagatgttgatgttagtgaagattcacctcctcccctacctgaaagaactcctgaatcgtttgtgttagcaagtgaacataatacacctgtaagatcggaatggagtgaacttcaaagtcaggaacgatctgaacaaaaaagtctgaaggcttgataacctctgaaaatgagaaatgtgatcatccagcgggaggtattcactatgaaatgtgcatagaatgtccacctactttcagtgacaagagagaacaaatatcagaaaatccaacagaagccacagatattggttttggtaatcgatgtggaaaacccaaaggaccaagagatccaccttcagaatggacatgattcagggagctagaagacactttaagttatactggaaaattcaggtgccactgaaagccagatttatagtattccatctttaatatgtgggactaacagcagtgt

SEQ ID NO: 1736 - DNA, 499 bp, Homo sapiens
actttttgtagaaacaggatcttgccaccttgcccaggctggtcttgaactcctgagctcatgccatctgcctgccttagtctcccaaaatgctgggattacaggagtgagccaccatgcccggctggcagttgcatggaagagaacacctctttatggcttaccctctagaatttctaatttatgtgttctgttgaaatttttgtttttttacctttattgaaacaacaaaaagtcagtattgaaacatatcttcctgttttctgttgtcaaatgatgataatgtgccatgatgttttatatatatcattcagaaaaagttttattttttaataacattctattaacattattttgcttgccgctggcatgcctgaggaatgtatttggctttgattacacactaagtttttgtaataaatttgactcattaaaaacctttttttttaaaaaaaaaaaaaagaaaatctcattagtgaacttatctttgcagctgagt

SEQ ID NO: 1737 - DNA, 482 bp, Homo sapiens
acaagtattcttgatctcagagacaagttcaatgaatctcttcaagtgaatactactgctctcatcccaaaggaagccaactctgaggaagtctttttgtttaaaccagaaaacattacttttgaaaatggcacagatcttttcattgctattcaagctgttgataaggtcgatctgaaatcagaaatatccaacattgcacgagtatctttgtttattcctccacagactccgccagagacacctagtcctgatgaaacgtctgctccttgtcctaatattcatatcaacagcaccattcctggcattcacattttaaaaattatgtggaagtggataggagaactgcagctgtcaatagcctagggctgaatttttgtcagataaataaaataaatcattcatccttttttttgattataaaattttctaaaatgtattttagacttcctgtagggggcgatatactaaatgtatatagt

SEQ ID NO: 1738 - DNA, 497 bp, Homo sapiens
acacagtgaagagaaataaaaaggtggcttccgtatttccctccctcagtaaggttatgtgttgcataaagggatgaggctcattttggtgaaaaatgctttcatacagaaaattttgaattgagtgacctccccgcacaggcgttccaggccctgacctgaacaaggaaatcaaagtaagttaacaccactggcttcacatgaacctcaagactataatctaacggtatctaccatctcctttactttagaaaagtttaatgtccatttacctataccaaatcagtagacttaattttctctcttaggaagtttttaaccaaattacagctaaactaatctcactttaaagtgcaagaaggctctgctagagtagtgtttgttctgtggcatagaaagaggagcatgcctcctccggcactggcctaagaggccccacatgaagaactagctgcaagacagtgatccattaggtctgccaaaaagcagggggaccc

SEQ ID NO: 1739 - DNA, 378 bp, Homo sapiens
  misc_feature 74, 132, 200, 215, 222, 270, 277, 339: n = A,T,C or G
acaagcttttttttttttttttttttttttttttttgttatttagtttttatttcataatcataaacttaactntgcaatccagctaggcatgggagggaacaaggaaaacatggaacccaaagggaactgnagcgagagcacaaagattctaggatactgcgagcaaatggggtggaggggtgctctcctgagctacanaaggaatgatctggnggttaanataaaacacaagtcaaacttattcgagttgtccacagtcagcaatggngatcttnttgctggtcttgccattcctggacccaaagcgctccatggcctccacaatattcatgccttntttcactttgccaaacaccacatgcttgccatccaacca

SEQ ID NO: 1740 - DNA, 281 bp, Homo sapiens
acaaccccaggaacccctggtgctgaaggatgtggaaaacacagattggcgcctactgcggggtgacacggatgtcagggtagagaggaaagacccaaaccaggtggaactgtggggactcaaggaaggcacctacctgttccagctgacagtgactagctcagaccacccagaggacacggccaacgtcacagtcactgtgctgtccaccaagcagacagaagactactgcctcgcatccaacaaggtgggtcgctgccggggctctttcccacgctggt

SEQ ID NO: 1741 - DNA, 482 bp, Homo sapiens
  misc_feature 471: n = A,T,C or G
accggagacaggtgcagtccctcacctgtgaagtggatgcccttaaaggaaccaatgagtccctggaacgccagatgcgtgaaatggaagagaactttgccgttgaagctgctaactaccaagacactactggccgcctgcaggatgagattcagaatatgaaggaggaaatggctcgtcaccttcgtgaataccaagacctgctcaatgttaagatggcccttgacattgagattgccacctacaggaagctgctggaaggcgaggagagcaggatttctctgcctcttccaaacttttcctccctgaacctgagggaaactaatctggattcactccctctggttgatacccactcaaaaaggacacttctgattaagacggttgaaactagagatggacaggttatcaacgaaacttctcagcatcacgatgaccttgaataaaaattgcacacactcagtgcagcantatattaccag

SEQ ID NO: 1742 - DNA, 342 bp, Homo sapiens
  misc_feature 326, 328: n = A,T,C or G
ttgatgatttgtttggcatataggaagcacgctggtgctaagtattttttaaatggttatgtaagcaaagctgaactgtaaatcttcaggaatatgtattaagattgtggaatgggtgtaagacaattggtagggggtgaaagtgggtttgattaaatggatcttttatggccctatgatctatcctttacttgaaagcttttgaaaagtggaaaggtcattttgttgcatttccccatttcttgtttttaaaagaccaacaaatctcaagccctataaatggcttgtattgaacttttacatttgaattaaagatgttaaacatnanaaaaaaaagcttgt

SEQ ID NO: 1743 - DNA, 383 bp, Homo sapiens
ctgtcttacgctgacaaagattattgaagcaagactaaagatgtataaacattccaataataaggccatgactacgggggcaattgctgcaatgctgtctacaatcctgtattcaaggcgcttctttccatactatgtttacaacatcatcggtggacttgatgaagaaggaaagggggctgtatacagctttgatccagtagggtcttaccagagagactccttcaaggctggaggctcagcaagtgccatgctacagcccctgcttgacaaccaggttggttttaagaacatgcagaatgtggagcatgttccgctgtccttggacagagccatgcggctggtgaaagatgtcttcatttctgcggctgagagagatgtgt

SEQ ID NO: 1744 - DNA, 550 bp, Homo sapiens
actttcaaggagatctgaatctctactctttatcaggatatggaacagatgctatcatctacttaaaggctttgtcttctgagtctatagaaaaacttccagtttttaacaagtcagccttcaaacattatcagatgagctctgaggctgatgactggtgtatcccaagcagggaaccaaagaacctggcaaaagaagtggccatgtgaagagggacactcaggacactttacgggatcaaagtgggtctacaccagtgctgcttcctgaatgtttgtgtgtgaacccttgtttcctccaaaacaaacgacagcaacgaaaactccttaatcagaacactgatccaatgaggaatggagcttgtttctgtgacccaggagaacttagtgcaagactacaggagttaacagatggccagctccttattttttaatgtagaataactcctgagtttatatcaaatcctgaagaaataagcctcagttttccatctgtttttgataagaataagaaagggagtgagtgtgaagatggtggttagcagtttcac

SEQ ID NO: 1745 - DNA, 269 bp, Homo sapiens
acatttaaaaaaatgttaagatggacgggcgtggtggctcatgcctgttatcccagaactttaggaaaccgaagcaggtcgtcgcttgaggtcaggagttcgagaacagcccggccaacatggtgaaaccctgccttaactaaaaatacaaaaaattagccgggcatggtggcaggcacctgtggtcccggctactcgggaggctggggcaggagaatggcgtgaacctgggaggcagagcttgcagtgagccagggtcacgctactgc

SEQ ID NO: 1746 - DNA, 495 bp, Homo sapiens
  misc_feature 94, 151, 238, 247, 329, 383, 406, 421: n = A,T,C or G
ttttttttttttttttttttttctttattactaaaggtttatttacatagtgtttaaagcataataaaaaataaattacaatacaaaagtgctntttaggaaggagacactaaacaacaggcccatattaccccttgactatttagccaanacataagctacaaattttgccggaaaaactgtccatacatttttaactacttcttcattattcttatggaccatcatccaggacatntgtttgaanaaatatccagttataatattttcaaaggttagaattgtgaagaaaaaatataaaatgtgattaaaggatatatagccttcanatgtaatttacagttttaaaattgcactttaaaactttgcttttttagacagtntaaaaggcagaatgagacagatntgtaatgaatttcanaactgaggttcatatgtaaatcatacaattttttaaaaaatagtattggaaaaatatcaaggtctatacattta

SEQ ID NO: 1747 - DNA, 390 bp, Homo sapiens
acatactgttgaggctgtagtgggaggaagaggtgggccaccgctggacactcttgggccgaggggcaagggtggacatagcattggcatggcagcaagagacttggctgagggcaggggtggaaggatgtctactgctgaagaccaaatcccttgccactctgtcggttgctactaagtcaaacgcaaacagaaacaggaaaagacagcaggagcacagaggccagcatctccctttccttatgccatggagccaggtgccaggcgtgggctggtccatctccctcctcagcctctgccaaagggctgctccagtgctcccctcagtggaactcctcagccaggcgctctgaaaccaaccacagtccactgaagttgaccaccctaccg

SEQ ID NO: 1748 - DNA, 76 bp, Homo sapiens
acatcgatcaagaagagctcaacaaaacaaagcccatctggaccagaaatcccgacgatattactaatgaggagtg

SEQ ID NO: 1749 - DNA, 370 bp, Homo sapiens
acacaagagatgccccatggggcattccatagcagagacagactcctgtatgttttattccagaggcattgcatggtgataataaaatgataggaaatagaggaaaatagatacaggaaaaggcaatagacagggaagccagctagatgttagagtatggagcaatcgaggaggcataaccactcttggggtggctatagggctggaaaatgctgaagatgactgctttcactgaggtcaaggattgtaatattgccagctttgtaaagccattaaagcagaagtttcttcagtgatcttctctctaagaaacaccatcacctccatgtgccttacagaggccccctgcgttctgctgcattgcttttgc

SEQ ID NO: 1750 - DNA, 537 bp, Homo sapiens
acataagacagttgatagggttcctttcaaataggtagtctagatatgctaaattggggagtataaaaaacccagagtatctttttcatttcccttaaaaaaaatggctctgaatattttgtctactttaagactggaacactggttaataacgaggtttctacagggtaagttggggaacagatactaaaggagttgaacagtattcttaatattccagtttgtattcttttgcatctgcctaaagctgaagactacttttagatatatgctattctggtgggtgctgtttttctaagaatccttaacatccaattttgacaaccatgtgttatgtggaatctcagcatccagcagccttttatattactaaagttgaccactatttttattttaggggaggagaaactgggggaggggagaggcaggaagtatgataaaacaagcactttacagacgcactccacaacagcactaattctaaataccaaacaccaataaaacccaaatcataatgctgaaaactaaaaaattaga

SEQ ID NO: 1751 - DNA, 583 bp, Homo sapiens
  misc_feature 167, 528: n = A,T,C or G
acccaaaatcaaggagactgccagagaccagcaggggatctaagggatttaccactgggttagcacagacactacacttgaagatttcctagcggctgctgctgctgtttccatgataagaattcagtgagacaaagaacctgccaagctcattaaccgagtagcangaagagctactgtgtagcctctggtgttccccaactgactcagccctgcagatgggacatcctgtaggtcatgtgaatatcaagttactgagggatgttctcaggacaagcctagcataggcaccaggtgggaaagggtgtcaaaaaattataccttctgtctgctaagcagaaaaacttaattgggatcaatttagctcactccagagttctcattttattctcccagtattcatccagaaaacaagtttcttgatgatatgggaagatcacatttccacagtgattcatttgcaggtaagcaaatgtcctttacccaatttttatcctagctcaaagttggcttttttttttttgaggncataatagccttccatttttatttcctacttcctgagacacacacacttatgtgt

SEQ ID NO: 1752 - DNA, 160 bp, Homo sapiens
acataggtctttatttaaacactgattttttttttaaatatatacacacaaaacttagttcagcaaggcttcatgatatacaccaattccaaaataaaacaatcaaatggtccaggtgtagaatgccagattccttttatcatctgcgaggaaaagagaa

SEQ ID NO: 1753 - DNA, 145 bp, Homo sapiens
gctctggcagccttcctcaaaaagtccgggaagctgaaagtccccgaatgggtggataccgtcaagctggccaagcacaaagagcttgctccctacgatgagaactggttctacacgcgagctgcttccacagcgcggcacctgt

SEQ ID NO: 1754 - DNA, 414 bp, Homo sapiens
acagttaaaaatctgatgataatttattataataagaacacaactcacatagaaatttagttacttctgtggcatatgacattatggctgataaccaattagatttctagaatttcttatataacttttggaatacatcaataacatactcataaatataacttagagaaggtttaacatcactaatgatttgacagtgcttcccatataatttaacatatcaaataaggtggcctttccattcagcttctgtttctcaactagattcctaatttcctggtggggcccattaatgaacagggccaacaaagtataggcttacgtatgttgaaaaactccacaggcaattctttttttttttttttttttttttttgagacggagtcttgctctgtcgcccaggctggagtgcaa

SEQ ID NO: 1755 - DNA, 472 bp, Homo sapiens
gggttatggccggtcccttgcagggcggtggggcccgggccctggacctactccggggcctgccgcgtgtgagcctggccaacttaaagccgaatcccggctccaagaaaccggagagaagaccaagaggtcggagaagaggtagaaaatgtggcagaggccataaaggagaaaggcaaagaggaacccggccccgcttgggctttgagggaggccagactccattttacatccgaatcccaaaatacgggtttaacgaaggacatagtttcagacgccagtataagcctttgagtctcaatagactgcagtatcttattgatttgggtcgtgttgatcctagtcaacctattgacttaacccagcttgtcaatgggagaggtgtgaccatccagccacttaaaagggattatggtgtccagctggttgaggagggtgctgacacctttacggcaaaagttaatattgaagt

SEQ ID NO: 1756 - DNA, 459 bp, Homo sapiens
acgaaacctccgtggtgacggggacggtggagcagggcaccctggtctcattgcgaggggtgcaggtcttgcagcatccattgggcatgaatgtgatggagcccgggatgcaaatgctggcatcaaagttggggcaggtgatgttggagacggacgagatgagctggttgtggatcttcacgcagctgaagaatgtgcagttgttcttcgggtcgctcttgaagtccccgggcttcaggatgacgtgctggttgtcgggccgtttgatgatacagtgcgtctgttcacacttcttacagcactccccgggggcctccatgagttcgaagccagggctgcaggaggtgttgcagggcacgtgggtgcaggcgatgacgttgagcagggtgttgttgtccaccttgtccgtgcacacgcagtcctggcacttggaggaataaactggagaaccgggctggt

SEQ ID NO: 1757 - DNA, 289 bp, Homo sapiens
acagtggcgcgatcttagctcactgcaacctccgcctcccgggttcaagcaattttcctgcctcagcagggattacaggtgcccaccactgcttcggctaatttttgttattttcagtagagacagagtttcactatgttggccaggctggtctcgaactgctgacctcgagatccatctgccttggcctcccaaagtgctgggattaaggcgtgaaccaccgtgcccggcctgggcaactgatattcatgtctgaagtgcatgcctagcacgcccgctaggatcagct

SEQ ID NO: 1758 - DNA, 322 bp, Homo sapiens
acgacagctacataatgactcacattcatgatattccatcactgaggaaactgctaaagatggtccgtgtgtgaaataattccttagagaaacacggagctggaaaaataatcactgattagaccttaaaaatagttcactgcataacatgacaaaaagcacaaaggctcattcagagaacatatttgttgttctccaacactgtaatagttataatttcaccatgacaaacaccagacattaagattaagctaacactggtgtttcttttgctcccccccttttaaaaacaaaatatataactgcatgtcactatagcaac

SEQ ID NO: 1759 - DNA, 209 bp, Homo sapiens
acagggtgaggtctccgtcctggaacttggggagctgcccgtataggcaggaggctttgagtgagccctcctgccacgtctccacggtcaccacctcctccttccagctctggccctgatctgccagcagcatgcgcagggccgcgcagcggcctcgaactgggaaatagaccacggtgtagggcggcatggtggcgaagactgcggcg

SEQ ID NO: 1760 - DNA, 368 bp, Homo sapiens
ctgagactgtgtctcaaataaataaataaaggaatgaagtgctgatacatgctataccaaggatgaatcttgaaaacattatgctgagggaaagaggctgcctcttgtatgatttaatttacataaactgtctaaattaggcaaatccacagagacggaaagcatattggtgattgccaggggttggggggctggcgggaaacgggaatgaccatcaatttgtatgggatttcgtgggggttggtaaaagcattttaaaattgaatagttgtaattttatataaaattagatagcaataatggttgcacagctgttagtaaaccaaaaaataccaaattaaacaccttaaaagggtaaattttacggt

SEQ ID NO: 1761 - DNA, 381 bp, Homo sapiens
gtcaggtcttcctctttcctgagactggatctgttcaaacagcaaacgcccacagatggcccagaggtggtggtagtcagggtgtgtgggtgtttttagggttctttagtgttgtttctttcacccaggggtggtggtcccagccagtttggtgctgacggtgagaggaaattagaatctgtttgcaaattgtccaacccaccccctcaacatgaggggcttccattttctgtgttttgtaagggaactgtttccttcatgccgccatgttcctgatattagttctgatttctttttaacaaatgttatcatgattaagaaaatttccagcactttaatggccaattaactgagaatgtaagaaaattgatgctgtacctg

SEQ ID NO: 1762 - DNA, 431 bp, Homo sapiens
  misc_feature 67, 90, 114, 168, 174, 212, 275, 318, 357: n = A,T,C or G
acaagcttttttttttttttttttttttttttttttatttgcctgctgctgctaggaggaggcctantagtggggtgaggcttggattanccgtttaaaagggctatttgttgngggtctcatgagttggagtgtaggataaatcatgctaaggcgaggatgaaaccnatatcnccgatacggttgtataggattgcttgaatggctgctgngttggcatctgctcgggcgtatcatcaactgatgagcaagaaggatataattcctacgccctntcagccgatgaacagttggaataggttgttagcggtaactaanattagtatggtaattaggaagatgagtagatatttgaanaactgattaatgtttggatctgagtttatatatcacagtgagaattctatgatggaccatgtaacgaacaatgc

SEQ ID NO: 1763 - DNA, 395 bp, Homo sapiens
actacacgcgcctgggcaacgacttccacacgaacaagcgcgtgtgcgaggagatcgccattatccccagcaaaaagctccgcaacaagatagcaggttatgtcacgcatctgatgaagcgaattcagagaggcccagtaagaggtatctccatcaagctgcaggaggaggagagagaaaggagagacaattatgttcctgaggtctcagccttggatcaggagattattgaagtagatcctgacactaaggaaatgctgaagcttttggacttcggcagtctgtccaaccttcaggtcactcagcctacagttgggatgaatttcaaaacgcctcggggacctgtttgaattttttctgtagtgctgtattattttcaataaatctgggacaac

SEQ ID NO: 1764 - DNA, 187 bp, Homo sapiens
accgcggccgttaaacatgtgtcactgggcaggcggtgcctctaatactggtgatgctagaggtgatgtttttggtaaacaggcggggtaagatttgccgagttccttttactttttttaacctttccttatgagcatgcctgtgttgggttgacagtgagggtaataatgacttgttggttgattg

SEQ ID NO: 1765 - DNA, 547 bp, Homo sapiens
actcgggctctgactacagaagtggccttgcactccctgccattgatggtctggattccaccacttgtgtccatggagcatccttctccgatagtgaagatgaatcctgtgtgccactgctgcggaaagagtccatccagctaagggacctggactctgcgctcttggctgaggtcaaggatgtgctgattccccatgagcgggtggtcacccacagtgaccgagtcattggcaaaggccactttggagttgtctaccacggagaatacatagaccaggcccagaatcgaatccaatgtgccatcaagtcactaagtcgcatcacagagatgcagcaggtggaggccttcctgcgagaggggctgctcatgcgtggcctgaaccacccgaatgtgctggctctcattggtatcatgttgccacctgagggcctgccccatgtgctgctgccctatatgtgccacggtgacctgctccagttcatccgctcacctcagcggaaccccaccgtgaaggacctcatcagctttggcctgcaggtagcccg

SEQ ID NO: 1766 - DNA, 348 bp, Homo sapiens
ttcctggaatgactctccccttgcccctccttctccatcacttaaatagaagctactcttcaaaaaacatgaaatatttttcttcatgaaaacgcttgcgggactgggcgcagtggctcacgcctgtaaacccagcactttgggaggccgaggcgggtggatcacctgaggtcgggagtttgagaccagcctgaccaacatggtgaaaccccatctctactaaaatacaaaaaattgtctgggcgtggtggcgcgtgcctgtagtcccagctactcgggaggctgaggcgggagaattgcttgaacccaggaggcagaggttgcagtgagctgacatcacagcactgt

SEQ ID NO: 1767 - DNA, 586 bp, Homo sapiens
actttgacgtggagaggaactcctgcaataacttcatctatggaggctgccggggcaataagaacagctaccgctctgaggaggcctgcatgctccgctgcttccgccagcaggagaatcctcccctgccccttggctcaaaggtggtggttctggcggggctgttcgtgatggtgttgatcctcttcctgggaacctccatggtctacctgatccgggtggcacggaggaaccaggagcgtgccctgcgcaccgtctggagctccggagatgacaaggagcagctggtgaagaacacatatgtcctgtgaccgccctgtcgccaagaggactggggaagggaggggagactatgtgtgagctttttttaaatagagggattgactcggatttgagtgatcattagggctgaggtctgtttctctgggaggtaggacggctgcttcctggtctggcagggatgggtttgctttggaaatcctctaggaggctcctcctcgcatggcctgcagtctggcagcagccccgagttgtttcctcgctgatcgatttctttcctccaggtagagttttctttgcttatgtt

SEQ ID NO: 1768 - DNA, 326 bp, Homo sapiens
accttccagccaggaccatgacttagtgcctcccccctgtggggagagcatgtctcccccagaagctgaggctctgagaggacaaggggcagggtggggtggggctgctgagcacacactgggtcagcccggggctacacggggctggtcacgtgaggggacctctaggcggagggcttggcttttttgcattccattacacaaggacagagcacagacgtggccggggacgctggcagagccagggtcgctccggacaggacagtgttagcgcagggctttcaggagtcactcttcttcttgctcttcttcagaaaggacggggt

SEQ ID NO: 1769 - DNA, 397 bp, Homo sapiens
actcataaaaaaagtcttaccccaaaattgcaaacaaatacattaaaagattagaagaggtgatagaaagcaccagacattaaacaaaataaaaataataaaataaattcaactcaaaaggtccccattcagcaaatactttgtaaagtatggcctgtatgtaaatagtgctaaatcaaggactttttagcagaaaattgctcggttcttttatctaaggcttgaatttgtaaagtgaaggcataaaagttaccaaacattaagtaactcttaaaatggcacacaggttttaaagctattggtttttccttcctaactctctgaatttttcccatggcctttgtagatcaactatttcaaacgtattttacaccagcaactctcaacatacttgtct

SEQ ID NO: 1770 - DNA, 302 bp, Homo sapiens
ttttaacttggactagtgtaactccttcatgcaataaactgaaaagagtcatgctgtctagtcttgaagtccctcatttaaacagaggtcaagcaataggcgcctggcagtgtcaagcctgaaaccaagcaataccgtcatgtttcagccaagcccagagccctaagattacaaacaactatggccggaacctcctcagctctccctctgcagagttccctaccctaagagaatgttaccacctgaacagtcctcggtgaatctgagaggagaggatggggtaaggcagaagcaccagctgt

SEQ ID NO: 1771 - DNA, 245 bp, Homo sapiens
  misc_feature 29, 74, 115, 203: n = A,T,C or G
tctttttttttttttttttttttttttcnaaagacaggctattttatttcaaaaaaagaaaaaaaagtgggctntgggaacagggttagtccattcgggccttcagtgtcctggnggtgattttgtccttctcgatgatgtggacaatgactcccatgcctgacactgcatcccggtccacagcattcagcatggcttggganatggtttcaaacaggtgatccggatccgtttcacctgcccgg

SEQ ID NO: 1772 - DNA, 477 bp, Homo sapiens
accagtagatcagctgcctagcgagggcaggtttcttctttgcatctgtgtggcttgcttccagtctggcctgtcctttccagctgccttttgtctagcctgctatggggggccagattatcttgataagagcaggtgatttggggactagctgggttggcaggaaaagagcaggatggatctcttgggacaggttcccccaggagtataaacacaaggagccaggattgtgctgacagccaaggaaacagtagtgcctgtttgagttggcagagagggccttggcacctcttgcatccaggcagtcttgtgagatgggggcacatagcactggggaaagcagaactccattctcacctctattttgagcttcagtgctttatttcagtatgaggaaaaacaacaacaaactgaagtgcgctttccgtcctttcaaaggacaactgtcgggaagggagagccgagttgcgaggtagg

SEQ ID NO: 1773 - DNA, 294 bp, Homo sapiens
ttttttttttttttttttttttacttaaaatacaaagaaaattttatttgtatatcaaagactctaagaaatgatgacataaggttaacagagttgatgtcaagacaaataggtttgaagttatagatgataaatcactttgtcttactgaaccttcccttgattacgttagagagcatccctggtatgctcccagttgaatcttaagcatgatgtgtgtccgggtgatataatcgtaattcctttctgttaatcctcgttctctctcttttttttctttttcttctttttctc

SEQ ID NO: 1774 - DNA, 497 bp, Homo sapiens
  misc_feature 463: n = A,T,C or G
accagtggcgagtccagggtcacccacataccatgcaccacgggtgctatgccacttcttacaggacctttttagccctcaaaagaccttccaaggagaggccctggaggcaactgggtagggtgcagaacggcatgctttggctggaacacgcatccctccttccacggccggctctcagcctggaagccttttagcctacaggatccacctctctgctccctcagaggtgcctcttcatgtgcagggccaggtggtcggacctggaaaaacacctgcaagggcaaatcagaagcacagaagaagttaggttcccatcccttgccagtgttctggaccagcgccctcacctccctgccctgcccagcctaaccccctgcagggaaaggtgggattctcctcccaagcctcatcagtgtcttcagggacaggagataccaactgataggaatgtgaattaagnatgtcccccaccagtggctggaggttctttggag

SEQ ID NO: 1775 - DNA, 544 bp, Homo sapiens
  misc_feature 258, 327, 455, 543: n = A,T,C or G
acaagcttttttttttttttttttttttttttttatttttgaatgtatttttaaatttattttttcaaaataatgacattagtaaaaattttacatagcctgtattgaattcacacattcaaatgaggctttaccagtaatgatggggattaatacagagctagtgtttggcatttgactttatctcaaatgagctaactgctcaatgaattacagaagactcatactctttttattttttcctggaaattaaaaaanaaaagctttactaaatattgacatatatatttactccaaattttacatttagtgaaataagaatatctntagtagctcagttaacatcaacagaaagcttcaaaagatgattctgaaaatggcaggcaaaatttctttttattgtaggcaattacttaaactggaaatttggctttatgcataataagtcatgtggntaaaacatccacattgcagttaggtttccagtatctagcttttatttattttttagcaatgacattaacaagattttgccaggttatna

SEQ ID NO: 1776 - DNA, 168 bp, Homo sapiens
actacaaaatagtcattgcatgcaatggtgaggcccgcaattagggaaaggaagctctggaagcccactttgccatctctacactggtccaggtccttcattattttgtccacagccagagggtctttttgattttccaaaaatccagggaactccttttccatgagt

SEQ ID NO: 1777 - DNA, 431 bp, Homo sapiens
actctgctatggtgctggcttcctttaaactcaggatagatgccaggtgggctccgtttccgtaagactgacactcgagctcggcatcagaccagttcctcagcttcctgaagtaaccatagcaattggacttgtggtaaaaccatccaggagcacagctgggtctcatgatgatatcacccaggactcctgttttggccaggcagctcagcaataggagcagccgcatgcttctggaagccatcttcctcctaccctgaggatgtagctagtgcaaggatctcagagaccttactagcgcttctttgaaactcctgggttctccttgatctgcaaatctgtttggcaaccaagactctaagggcccctgccttcttcagtgtctccagtggtcccagtcaacgtttctggagcttttatatcttcttgcc

SEQ ID NO: 1778 - DNA, 591 bp, Homo sapiens
acctgggactacagacaccaccacacctggctaatttttttattttttatagagacacagtctttccatgttgcctatgttggtcttgaactcctgggctcaaataattttcccaccttggcctcctgtagtgctgggattacgggcataagccactgtgtcaggccccatgtatgttaatagtgaatgtttggcttttcatttgttactttcaactattaaaggatacctattacagacacaggaatttacattttcaaagtcatttttgacacatcagtgctgcatctacttttctccttttagcacatttgatattgatacttcagagaaacttttttaactacccttaaaatcttgtcaatgaccattaactgccaatcatcacctcatttgctttttttgacaacatactactagaaacctaggctgtgagtgtaaaaccataactgttagaatcatttttttggcaatagctcacattctgttaagagtcatttgctttaatcaaagatcatgatttattatatattttttataagtagggatggggccaagattattcctttggcacagcagtaagtgtgctca

SEQ ID NO: 1779 - DNA, 411 bp, Homo sapiens
acttggaaggaaaagaccagctcgggggttggtttcagtcatccttattaacaagtgtggcagcaaggaagagagcaccttataagacagtgattgttcatggatttacccttggagaaaagggagaaaagatgtccaagtctcttgggaatgtcattcatcctgatgttgtcgttaatggaggacaagatcaaagcaaagagcctccgtatggtgctgatgtccttcgctggtgggtagctgattccaatgtcttcaccgaagttgcaattggcccatccgtgctcaatgctgccagagatgatattagcaagcttaggaatacacttcgctttcttttgggaaatgtggctgatttcaacccagaaacagattccatccctgtaaacgatatgtatgtcatagaccagt

SEQ ID NO: 1780 - DNA, 414 bp, Homo sapiens
acccctgcgacgattttggagtggtttcctctctcaacaaggacaacaatggaggtgatcaggtagaggattgccgctatgagggttcggaagaaatcactccagggccagttgatgaatggtatcttggtgtgcaggtcacacatgtagacaacaaagaaaatagcagcaaggatcatctcaatcaccgacagggaggagtagcctggtgtggaggcactgaagcagatcaggatcaccaggcataatataatctcagcaaacaggaggattccctttcgagtgcgcgagaagttggtgcaggcggcccagcagccaggagccgagaggcgctcagaatccgccatggcatgggctggagtccctggtgcctcggaggatctgctcacttgctcgtggtttcgaggacgctgt

SEQ ID NO: 1781 - DNA, 495 bp, Homo sapiens
gttgcgttacaccctttcttgacaaaacctaacttgcgcagaaaacaagatgagattggcatggctttatttgtttttttgttttgttttggttttttttttttggcttgactcaggatttaaaaactggaacggtgaaggtgacagcagtcggttggagcgagcatcccccaaagttcacaatgtggccgaggactttgattgcacattgttgtttttttaatagtcattccaaatatgagatgcattgttacaggaagtcccttgccatcctaaaagccaccccacttccctctaaggagaatggcccagtcctctcccaagtccacacaggggaggtgatagcattgctttcgtgtaaattatgtaatgcaaaatttttttaatcttcgccttaatacttttttattttgttttattttgaatgatgagccttcgtgcccccccttcccccttttttgtcccccaacttgagatgtatgaaggcttttggtc

SEQ ID NO: 1782 - DNA, 366 bp, Homo sapiens
acgccgccaatgggatgggcccactgaaggtgcttagcggctctgaggtgaccgcatagacttctcagaccaagggacctggatgacaggcaatcaaggcctgagcaaccaaaaggagtgccccatatggcttttctacctgtaacatgcacatagagccatggccgtagatttataaataccaagagaagttctatttttgtaaagactgcaaaaaggaggaaaaaaaccttcaaaaacgccccctaagtcaacgctccattgactgaagacagtccctatcctagaggggttgagctttcttcctccttgggttggaggagaccaggatgcctcttatctccttctagcggtctgcctcctggt

SEQ ID NO: 1783 - DNA, 475 bp, Homo sapiens
gcagattgtctctggatctcgagataaaaccatcaagctatggaataccctgggtgtgtgcaaatacactgtccaggatgagagccactcagagtgggtgtcttgtgtccgcttctcgcccaacagcagcaaccctatcatcgtctcctgtggctgggacaagctggtcaaggtatggaacctggctaactgcaagctgaagaccaaccacattggccacacaggctatctgaacacggtgactgtctctccagatggatccctctgtgcttctggaggcaaggatggccaggccatgttatgggatctcaacgaaggcaaacacctttacacgctagatggtggggacatcatcaacgccctgtgcttcagccctaaccgctactggctgtgtgctgccacaggccccagcatcaagatctgggatttagagggaaagatcattgtagatgaactgaagcaagaagttatcagt

SEQ ID NO: 1784 - DNA, 391 bp, Homo sapiens
  misc_feature 170: n = A,T,C or G
cactaaccatataccaatgatggcgcgatgtaacacgagaaagcacataccaaggccaccacacaccacctgtccaaaaaggccttcgatacgggataatcctatttattacctcagaagtttttttcttcgcaggatttttctgagccttttaccactccagcctagtnccctaccccccaattaggagggcactggcccccaacaggcatcaccccgctaaatcccctagaagtcccactcctaaacacatccgtattactcgcatcaggagtatcaatcacctgagctcaccatagtctaatagaaaacaaccgaaaccaaataattcaagcactgcttattacaattttactgggtctctattttaccctcctacaagcctcagagt

SEQ ID NO: 1785 - DNA, 493 bp, Homo sapiens
acttcaaggaagctcttgatagatgggcgcagttcttcatccacccactaatgatcagagatgcaattgaccgtgaagttgaagctgttgatagtgaatatcaacttgcaaggccttctgatgcaaacagaaaggaaatgttgtttgggagccttgctagacctggccatcctatgggaaaatttttttggggaaatgctgagacgctcaagcatgagccaagaaagagtaatattgatacacatgctagattgagagaattctggatgcgttactactcttctcattacatgactttagtggttcaatccaaagaaacactggatactttggaaaagtgggtgactgaaatcttctctcagataccaaacaatgggttacccagaccaaactttggccatttaacggatccatttgacacaccagcatttaacaaactttatagagttgttccaatcagaaaaattcatgctctgaccatcacatgggcact

SEQ ID NO: 1786 - DNA, 551 bp, Homo sapiens
acagaaatacatttcaactgatttaagtccaacaccagtgaaaggagaaattatggcaccaaaactttccctcttctatcatacgatgatttagattatgattcaaactacatttctcttttctaggctttgtcccataaaaatttgtgcagtttttcaacattagaattcttaattctattggaaacaaaacaaaacaaaacaaaacaaaaacaaaaccaaaccagacctcaagtcaacaaatctattgggatattgtttacgaacaaagtccaccttaagcattggtcctcaaaacagagctcctcaaaatattaggtgctgtgctcattacagaatcaaactgatcacactgattgaaaacttcctcaatgaaattttcaatcaacaacatgcttcaaataaaagtcaaacagtgttccaaccacttgatttcaaaccaagtagattttaggtttagaaacactaaaaaaaggtgtttcatttataaatacggaaggaacaaaaacatcactgcatcaatccagaaattatcaaaatatttagaggac

SEQ ID NO: 1787 - DNA, 107 bp, Homo sapiens
  misc_feature 38, 104: n = A,T,C or G
acaagcttttttttttttttttttttttttttttttgnttttttttttttttttttttttttttttttttttttttttttttttttttaaaaaaaaaaaaaaanttt

SEQ ID NO: 1788 - DNA, 608 bp, Homo sapiens
  misc_feature 527, 532: n = A,T,C or G
acttctgtgtgcaattgtaaacagaaattgcaatatggatgtttctttgtattataaaatttttccgctcttaattaaaaattactgtttaattgacatactcaggataacagagaatggtggtattcagtggtccaggattctgtaatgctttacacaggcagttttgaaatgaaaatcaatttacctttctgttacgatggagttggttttgatactcattttttctttatcacatggctgctacgggcacaagtgactatactgaagaacacagttaagtgttgtgcaaactggacatagcagcacatactacttcagagttcatgatgtagatgtctggtttctgcttacgtcttttaaactttctaattcaactccatttttcaattaataggtgaaattttattcatgctttgatagaaattatgtcaatgaaatgattctttttatttgtagcctacttatttgtgtttttcatatatctgaaatatgctaattatgttttctgtctgatatggaaaagnaaaangctgtgtctttatcaaaatatttaaacggttttttcagcatatcatcactgatcattggtaaccactaaagatgag

SEQ ID NO: 1789 - DNA, 86 bp, Homo sapiens
acaattaagctattattgactatactcacccggttgtgctatcaaatactaggtcttatttatactttctaactacatagtttttg

SEQ ID NO: 1790 - DNA, 538 bp, Homo sapiens
accaactcttgaaagcctatattactagtcatttcccattgagtattttggaattttattattctatttattcatattctacttatttataatgtattctgctttatgatgtttatctgaataatctggacaaattctcattctgggcagtcattcatttcatcctatgaatgccatggtaagggaaacaccgtagttaagaggaacagatgaagtcggaacactcacatgcatcacagtcacagaactttaagtcacgagatggaaaagacattgatcctgctttggatcaaagtttatagaacactacttaatggaaactagtggaaatggctgctaaaggaaaagttaaggtgaatgatccaagctgacttgatttactgaatccagaacaaaattatgctaaatctctctggtaattaactaaataaaaatgattttatactactactaagttagtaaaggggtgctactcattagacgctaatctcatttactgaggaacacagaattgtatgttttccacagttcagccagt

SEQ ID NO: 1791 - DNA, 497 bp, Homo sapiens
gctctggttcccggatctccgtgtcccgctccaccagcttcaggggcggcatggggtccgggggcctggccaccgggatagccgggggtctggcaggaatgggaggcatccagaacgagaaggagaccatgcaaagcctgaacgaccgcctggcctcttacctggacagagtgaggagcctggagaccgagaaccggaggctggagagcaaaatccgggagcacttggagaagaagggaccccaggtcagagactggagccattacttcaagatcatcgaggacctgagggctcagatcttcgcaaatactgtggacaatgcccgcatcgttctgcagattgacaatgcccgtcttgctgctgatgactttagagtcaagtatgagacagagctggccatgcgccagtctgtggagaacgacatccatgggctccgcaaggtcattgatgacaccaatatcacacgactgcagctggagacagagatcggggctctc

SEQ ID NO: 1792 - DNA, 488 bp, Homo sapiens
acagatcaataagacacacttggcttgtgcaggcatctgcttccactcagccccaatttctctccccttagctctccttgcctcaggtatcagcccttgagatctggcttcactttctgactttgggaatggggatgggaggggactgccttgaggacacagccatccagtcttctgctcctgtcttagcaagggacaagccctacagtcaattggtctcaccatgttgcccaggctggtctccaactcttgggctcaagcaatcctcccaccttggcctcccgacatgtaaacggtggctacatttccgcacaatccccgcggtctccctcattctgttttacaactactcccacataaagtaacgtagaaagacgagccccgttattcccttagaaggtagactggagcttgcaggaagctgtaggataaacattcagaggccaactgagataaaacgaaacacccaggtgattttaagctaatca

SEQ ID NO: 1793 - DNA, 582 bp, Homo sapiens
  misc_feature 561: n = A,T,C or G
acatttttagttacttaccttgaacatattcgtgtgaaaaagaatacatcatttctcacagtcttaagttgatatttatagaaatgaatacctttgtgaacctagacttagaacaaatcctgcttttgaaaaaaaatgttttgcttcttacaaaatcatttgtgttaataacaaaaactttattttcggagtgttctttgtataacttttccaagcttttacattaacgagcaggcctctgtcttaaaagggactcagtatattaatttctgcattttttaaatcaaatgaaaaacgtcaaattggaccaattgtcttggtttcttgattcatttatttgagaaaaaaacaatacaaagaaatgcattcatatcaaaattggaatagaaaggaaaacctatttttaagatatcaacctattttcacatcataaaacatctattacataaaataaaggtccaggcatagtggctcttgcctgtaatcccagcactttgggaggccgaggcaggtggatcactcaaggtcacaagtttgagaccagtctggccaacatggtgnaaccccatctctactaaaagt

SEQ ID NO: 1794 - DNA, 235 bp, Homo sapiens
accgccggaaacctcgcagccgctccctgcagtccaccggccaggtgttcctgggtatctacctcatctgtgtggcctactcactgcagcacagcaaggaggaccggctggcgtatctgaaccatctcccaggaggggagctgatgatccagctgttcttcgtgctgtatggcatcctggccctggcctttctgtcaggctactacgtgaccctcgctgcccagatcctggctgt

SEQ ID NO: 1795 - DNA, 341 bp, Homo sapiens
acccctgaacctaaaataaaagttaaaagccaagaaagcaaaatggagaaaaaagagttgaaaaggatccgagaacactaaatatatgaaatataaaatatatcaaagaaacaaatttctagagtccctgaaaagcagctacaaaataatagaacagttattttgaacgttaagtaaaaagaccaagccacatatggagggaaagaaatgacatgagcctcccacttctccacaccattcaatgctacttagcagtgatgcaatgcctatgtagtcctataggaatgaagtgatacaataatttgatatccaggcaacctggcgcatggctgtttagatgt

SEQ ID NO: 1796 - DNA, 133 bp, Homo sapiens
acaagtctaatattctttggagttcgtctttgccttaaatggatttatgatcatctttgtgaaccacgacctcattatttaaaaattcataagagagacagctcatcgaatagaccaggacacagggttcagg

SEQ ID NO: 1797 - DNA, 557 bp, Homo sapiens
actttgagccgctcaccctggctgcagtgggtgctgcctccaagaccctgagccacccgcagcagatggcactcctggaccagactaaaacattggcagagtctgccctgcagttgctatacactgccaaggaggctggtggtaacccaaagcaagcagctcacacccaggaagccctggaggaggctgtgcagatgatgaccgaggccgtagaggacctgacaacaaccctcaacgaggcagccagtgctgctggggtcgtgggtggcatggtggactccatcacccaggccatcaaccagctagatgaaggaccaatgggtgaaccagaaggttccttcgtggattaccaaacaactatggtgcggacagccaaggccattgcagtgaccgttcaggagatggttaccaagtcaaacaccagcccagaggagctgggccctcttgctaaccagctgaccagtgactatggccgtctggcctcggaggccaagcctgcagcggtggctgctgaaatgaagagataggttcccatatcaacaccgggtacctcggcc

SEQ ID NO: 1798 - DNA, 529 bp, Homo sapiens
accttgctaagcgacactagactaataaccattttctagaattaggtgacctacttctgaataaaattgaaactggattgcgtattcccttactaataataatactaaatatattcttaaatcagttttcaaaattcaagatgaaatctagaaatatggaacaactagcaggaataagcccgaagatgattctagctccgttactactaaaacctagtttctaaactttcgaggattttatatgaactcgcatgaaaaaatgagctcagaggctagaatatgactccagaacataccttggtcgggtatgttcatgctcaagtaatcagactctgctccaaatttcttgacataagcccttttatctacctaataagcatagcattatgccaaggactatattgaaaaaagaacactggcctaagattgatagtctggatttaagtccagatttagtcacagcctctatatggccttgggcaagttatctcagctctctgaaattcacatttggaatctgcaaaatgag

SEQ ID NO: 1799 - DNA, 352 bp, Homo sapiens
actctgaggcttgtaggagggtaaaatagagacccagtaaaattgtaataagcagtgcttgaattatttggtttcggttgttttctattagactatggtgagctcaggtgattgatactcctgatgcgagtaatacggatgtgtttaggagtgggacttctaggggatttagcggggtgatgcctgttgggggccagtgccctcctaattggggggtaggggctaggctggagtggtaaaaggctcagaaaaatcctgcgaagaaaaaaacttctgaggtaataaataggattatcccgtatcgaaggcctttttggacaggtggtgtgtggtggccttggtatgtgctttc

SEQ ID NO: 1800 - DNA, 556 bp, Homo sapiens
  misc_feature 485, 547: n = A,T,C or G
accaaagatcttgaacagagtggatgttcacaactgagtagaattttcctttcctgtgggcatgctgtattcagacctgacagatctttgatagaggtcagcttattaaagggcaatattgttcttgtttagctacatcactgtggtgaatatagatggaattaaggaagtaaatgcaggccagggggttgtgatgagaggataggggagataatatcagcatcaaattctttgggtatctctctaagaattaaataatcttttctagcttaatattttaattctaattcaaacaactctgaggttttggtttcattagtaatagttgaggaataatatactagcaaagaatggcctaatgtttgtcataactgttaatggatgaaattttttaaagatacaaccatgataaccattataaatgatctatgatcaaaatctaaagtgatgaattatttgtaggaatgtcttcctaatggggaagnattgcataggagcattatgcaaatctacacaagcttttataaatgttgctgctgggtagctncacagtgtt

SEQ ID NO: 1801 - DNA, 496 bp, Homo sapiens
tggtcatgcaccactccatgaagccccacccagccatcactgccacactcctggacttcatgtgccgcatcattcccaacttctatccaccattggagggccacgtgcggcagggtgtcttttcctccctcaaccacattgtggagaaacgggtcttggcacacctagctcccctgtttgacaaccctaagttggataaggagctgcgggcaatgctgagagagaagtttcctgagttctgcagctcaccctccccacctgtggaagtcaaaattgaggagccagtttccatggagatggacaaccatatgtcggataaggatgagagttgctatgacaatgcagaggcagccttcagtgacgatgaagaggatctcaacagcaaaggaaagaagagggagtttcgcttccaccctatcaaggagacagttgtggaggagccagttgatatcaccccttaccttgaccagttggatgagtccctgagggacaaagt

SEQ ID NO: 1802 - DNA, 295 bp, Homo sapiens
accaagccaaggttgggtagcgtgctttttataaagtcaactatggtttctaggttttcatgctgcagaatcaagggcttatggcttcccaacagacttaaagccactttaaatatgacctctgttccctgaagaaaaatcatatcaaagactctggctacgaatcccagcgggaactgtgaggcaaacatggtgaggaaccagggggcagcgtagaggctggggccgatctcgtgctcctccaggtgattgtagaggtctctgtggtaatcatgaagcaacctcgagagctggt

SEQ ID NO: 1803 - DNA, 357 bp, Homo sapiens; identical to SEQ ID NO: 1467

SEQ ID NO: 1804 - DNA, 523 bp, Homo sapiens
  misc_feature 408, 409, 502: n = A,T,C or G
acgggaccctgttcacgatggaccgggtgctgacccccccaatggggactgtcatggatgtcctgaagggagacaatcgctttagcatgctggtagctgccatccagtctgcaggactgacggagaccctcaaccgggaaggagtctacacagtctttgctcccacaaatgaagccttccgagccctgccaccaagagaacggagcagactcttgggagatgccaaggaacttgccaacatcctgaaataccacattggtgatgaaatcctggttagcggaggcatcggggccctggtgcggctaaagtctctccaaggtgacaagctggaagtcagcttgaaaaacaatgtggtgagtgtcaacaaggagcctgttgccgagcctgacatcatggccacaaatggcnntggtccatgtcatcaccaatgttctgcagcctccagccaacagacctcaggaaagaggggatgaacttgcagactctgcgcttgagatcttcnaacaagcatcagcgttttcca

SEQ ID NO: 1805 - DNA, 335 bp, Homo sapiens
  misc_feature 33, 126, 177, 222, 260: n = A,T,C or G
ctttttttttttttttttttttttttaagtcanaactcaccacccactgtgttaagccctacatgacaatcacatgaagatttacatacacatgttatatcatagtctcctcacaacatgtctaanaggtaggcacgtcattgttcccattttgcagatgaggaaactgaggttcanagagggcacttggcttgcccaaagtcacacagcggggagtggcanaggaagtcaggttgggtgaccccagtaactgctctcanaggctgggtgatgaccggcttcctggcttctctggaataaacctttgccaccacttcctgcatttcagcttcagt

SEQ ID NO: 1806 - DNA, 525 bp, Homo sapiens
ggccggaagcggtggtttttagcggctctctgggtagcagggtggtgtgatagcggcagcgaggggctcggagaggtgctcggattctcgtagctgtgccgggacttaaccaccaccatgtcgagcaaaagaacaaagaccaagaccaagaagcgccctcagcgtgcaacatccaatgtgtttgctatgtttgaccagtcacagattcaggagttcaaagaggccttcaacatgattgatcagaacagagatggtttcatcgacaaggaagatttgcatgatatgcttgcttcattggggaagaatccaactgatgagtatctagatgccatgatgaatgaggctccaggccccatcaatttcaccatgttcctcaccatgtttggtgagaagttaagtggcacagatcctgaagatgtcatcagaaatgcctttgcttgctttgatgaagaagcaactggcaccatacaggaagattacttgagagagctgctgacaaccatgggggatcggtttacagatgag

SEQ ID NO: 1807 - DNA, 317 bp, Homo sapiens; identical to SEQ ID NO: 1597

SEQ ID NO: 1808 - DNA, 172 bp, Homo sapiens
attaacattcttgtctactgtatattatcttggaaggctcttgttaatatgttacacttaatattctccacagttacctttagagagaatttatgagaagttagtttctgatgcagaggtttttaggctgtgatttcatcaaaagtccttttagcattctacctcaaagggg

SEQ ID NO: 1809 - DNA, 426 bp, Homo sapiens
acagtggtgagatcatagcttactgtagcctcgacctcccgggctcaaagatcctcacacctcagccttccaagtagttgggactacaggcatatatcatcatgcctggctaaattaactattttattttaagagatgtggtctagctatgttacccaggctggtctcgaactcctggcttctagcaatcctcccacctcagtctcctgaatcactgggattacaggctggggccatcatgcccagctctaggtttttaaaatgtaggcaaggaggtcagcatttacacaaaagcagggtttgatcttaggaagcttaataaagagaggggtctaatcaaggtttcctgtaggatctgggctttaagttaggccttaaagaacgaagaatgtttgtgggtgtagtaagcaatgacttggagcagag

SEQ ID NO: 1810 - DNA, 472 bp, Homo sapiens
actggagaggacctgaatttcaagcttctgatttagctgtttgtaaacttccaagttttgcttgactaaagaatgctgatcttttttgggagtctgatctccttctaatatcagaaagtgctttttatattccagattgcttgaattaaactgtttggattaaagaacatatatggagtttcctctctggttttaaataatctttctttattcagtagctattaataatttatctcatattcagcgaatatttattgagaatattgttgagaatctcttacatgccaggcactatactaagttaatatgcattcagtataccagttggtgtgacccagaccaaaggtaacacaaagatgaatgagaattccttcaaggcgccgataatcctagtaggagagctaagacacaaaactgttgcatgtttttaatcatcaaattaaacttctttccacgtccttaaaaaaaaaaa

SEQ ID NO: 1811 - DNA, 552 bp, Homo sapiens
acagttttctcagaagactcaagatttcgcccacatccctttgagctcccgctagatctgccgcccggctgcatttgtcccactcttcaggacagagttagctgccctctttctttacttcatagtctttgtaagggctcggccaagcgtgggcccgtgggatggagaattccttttggggaggctggttctgcagctgaaaatgtgtggaatagggggcatagagcgtgtcccctgtctcttcaaaaccttgagtgatttcctcttgagagtaggctctgttctccacaccatagctcttcttcacgagttgaggtttacagaaagcatcctcaacaggataatccatggggtttcgttgctttgtgagcagccaaaactcgggactaacataagccaacaggaacacccagccattggcagccaaggcggagctgaggatggtgtcatcccacctgcggtcaaagtcaggaagcatgagcagggtgatccaggccacccagatggcaattggagaggagcatcgtgaggtagatgtgagccccatgtctc

SEQ ID NO: 1812 - DNA, 562 bp, Homo sapiens
  misc_feature 31, 122, 159, 204, 299, 302, 315, 345, 384, 386, 394, 400,408, 427, 545: n = A,T,C or G
gctttttttttttttttttttttttttttgnttttttttttttttttttttgatgaaagatcgattcagtattattttgctgacattttaaatttaatcttcacataatctggctttagcanaagtcgctgaaatcaatatgtttctttttagctatgnggttttattaccttttcttgattagtatattaactagcagattanagcatacaagatttcctacaatatattcaattcacaaaaataatgtttcccaattcatccacttcaaaatgaccttaaactcctgtataggaaanatnaattgcttttttntggcaaacctgggagctgtctaaggggctnttggatggactttgcagccatatcacactcctaaaaggngngggtttanacattnaacctttntgccctgaaccacattctntgttgaacttcctcaccattgatttttttcttaaatctgagggtcaaagctttctattattttcattatatttttatctcactagttctaacctaatgctccaggcagttgggaaaanattatctaaatatctgc

SEQ ID NO: 1813 - DNA, 567 bp, Homo sapiens
gcatccagtctgtatttcttacacaaaattacatctaaatatttgacatgaggccatttgctatcataagccatcactaggaacttctagtctgtctcactcgattgaggctacaatgttgttaggtgctatgaccacaatgaatacaacagacagcctctcagctgtgctgcaaagtattcataaccaaaagaccatatttcaaattaaatcatagtagcgaatgacataccatttacatattacaatctgagcctctgaaacagggggaacatataatggtatccagaacatctttacatcaaaataacctatcatactacaaagttttcacttccaaaaagtgtaacagagtttaaggcactggtaactttgtccactgttagagattaaaacttccaaagcaaatgaaagaaccaatgttcacctttaacgtggggaaagttggcaaaaagaaccccaggaggacacccaaaccttctctgtgtcctctgtggaacctggcttttttctcttgtcctcagagaagaaacaaatgccgatatcctctgtttaaaatatgaaagt

SEQ ID NO: 1814 - DNA, 263 bp, Homo sapiens
accttcgccctcggggccttcagcggaggcatttccaccaatgagcgagtcatcaatgttaccttctgtcctactgaccatcttcccctccacctccaggcacaacccgtccgcgatctcccggatcttgtagatgtcggagaacatctcatcgtggctgatgaggtcccggtagataatcatgatggcgactgaagggagacgacgacggcgctagcttagcacgagcctgaaactcggagcgagcgcggtgcagccggagc

SEQ ID NO: 1815 - DNA, 464 bp, Homo sapiens
acatgagaaggaacttccaggtgttactgtaattcctcaacgtattgtttcgacagcactaatttaatgccgatatactctagatgaagttttacattgttgagctattgctgttctcttgggaactgaactcactttcctcctgaggctttggatttgacattgcatttgaccttttatgtagtaattgacatgtgccagggcaatgatgaatgagaatctacccccagatccaagcatcctgagcaactcttgattatccatattgagtcaaatggtaggcatttcctatcacctgtttccattcaacaagagcactacattcatttagctaaacggattccaaagagtagaattgcattgaccgcgactaatttcaaaatgctttttattattattattttttagacagtctcactttgtcgcccaggccggagtgcagtggtgcgatctcagatcagtgt

SEQ ID NO: 1816 - DNA, 407 bp, Homo sapiens
accctgcttctgctggcttaatgcctcagaactttggtgtcattggtctcagacaccactttgccatccactatccggcgggtggtggtcttttggatggtttgcatggagttgctgctgtccaaggcatcaccaagattaaagtcctcgccatcttccagcaggcggcggtaggtggcgatctcagcctccagcttgaccttgatgttcagcagggcctcatactcctgggcctggcgctgtccctctgcccgggtctgtgccagctctgactcaaggtgcagcaggatcccgttgagctgctccatctgtagggcgtagcgggcctccgcctccctcaggctgttctccaagctggccttcagatttctcatggagtccgggtcgatctccaaggactggactgt

SEQ ID NO: 1817 - DNA, 342 bp, Homo sapiens
acccaatgcctgcttattcaccatcaacaaagaagaccacacactgggaaacatcattaaatcacaactcctaaaagacccgcaagtgctatttgctggctacaaagtcccccaccccttggagcacaagatcatcatccgagtgcagaccacgccggactacagcccccaggaagcctttaccaacgccatcaccgacctcatcagtgagctgtccctgctggaggagcgctttcgggtggccataaaagacaagcaggaaggaattgagtaggggccagagggggctctgctcggcctgtgagccccgttcctacctgtgcctgaccctccgctccaggt

SEQ ID NO: 1818 - DNA, 549 bp, Homo sapiens
  misc_feature 465, 468, 495, 518: n = A,T,C or G
acaatcagcatttcagagctggaagggatctttaagatccaatccagcacccacattttaccaatgagaaaactaagcccaaacacatcataataacttgaccaaagttacattcctcagctgagccattcattcattcagtcattcattcacccacttactgaaagctgcctaagtgccaggctcggtgctaggagattgaaagcagcattcacaattgccaaggcagtcttttttccttgcatttttaagataaattcttaaatttcctgatcagcagaactcgtaggagagttccacagccttggtagaacctagcccactttcagtttcacacattttaataaacatagttgggtttaacttcagagaggcttcaattgtgtttactttaaatgattaagcattaacaaagggaggcatagtattctggatgagtccctttctagtacctgcccgggcggncgnccgggcaggtacagtcaaatctactgntgatttggttgttttgttgctgnggcagaatatgccatgaaacacatacagact

SEQ ID NO: 1819 - DNA, 542 bp, Homo sapiens
ggaaagctgagtgtagggctgatgttacggaggatgtagtcctcctatgtcttcctggatttttctccctggatcccagagaaatagcattcaagcccagcttgctcactcccatttgcatctggatcccagagaagtagcattcaaacccagcttgttcactcccatttgcaactcttctttgctgcaggcagttggctgggataacatggcattcatcttcctcaatcgctttttggacctgaccgatgaggctgagagagaagaggttcgagactgggtgcttacagtctccatggaccagcggctggagcaggttctgcctcgggatgagcgtggcgcctacgaggcctccctagtggcagcgagcactggtgttcgagccctgccctgccttattacaggataccccattctgaggaacaaaattgaatttaagcggccagggaagactgctaacaaggacaactggaataaattccttatgaccatcaagacctcccacagcccagtgtgccaggacgtgctgaaattcatcagtc

SEQ ID NO: 1820 - DNA, 200 bp, Homo sapiens
cccaaatgttacaaattaacagacaaaacagtcattggatgcagcggttttcatggagactgtcttacgctgacaaagattattgaagcaagactaaagatgtataagcattccaataataaggccatgactacgggggcaattgctgcaatgctgtctacaatcctgtattcaaggcgcttctttccatactatgttta

SEQ ID NO: 1821 - DNA, 301 bp, Homo sapiens
accattggtggccaattgatttgatggtaagggagggatcgttgacctcgtctgttatgtaaaggatgcgtagggatgggagggcgatgaggactaggatgatggcgggcaggatagttcagacggtctctatttcctgagcgtctgagatgttagtattagttagttttgttgtgagtgttaggaaaagggcatacaggactaggaagcagataaggaaaatgattatgagggcgtgatcatgaaaggtgataagctcttctatgataggggaagtagcgtcttgtagacctacttgcgc

SEQ ID NO: 1822 - DNA, 425 bp, Homo sapiens
aaattttgcttgtcactgcacatcaatataaaaaagcttatttaacttatcaaaacgtatttattgccaaactatgcttttttttgttaattttgttcatatttatcgggatgacaaatccatagaatatattcttttatgttaaattatgatcttcatattaatcttaaaattttgtaacgtgtctttttcctttttttccacagttttaatatattattcttcaacgacattttttgtaactttacacttttttggttattttattttaaaaaaatgaaaaattaatttaaaaaaatgcaaaaaactgttggattatttattttagaaattcccccctttgtgttggactgcaaattgagtttctttctctttaggcctttcacaactaggactgagaatgtatgtaaaagttctgtgacagt

SEQ ID NO: 1823 - DNA, 407 bp, Homo sapiens
acccaggaaggatgtgggaaacactttgcatcacccagcaagctgaaacgacatgccaaggcccacgagggctatgtatgtcaaaaaggatgttcctttgtggcaaaaacatggacggaacttctgaaacatgtgagagaaacccataaagaggaaatactatgtgaagtatgccggaaaacatttaaacgcaaagattaccttaagcaacacatgaaaactcatgccccagaaagggatgtatgtcgctgtccaagagaaggctgtggaagaacctatacaactgtgtttaatctccaaagccatatcctctccttccatgaggaaagccgcccttttgtgtgtgaacatgctggctgtggcaaaacatttgcaatgaaacaaagtctcactaggcatgctgttgt

SEQ ID NO: 1824 - DNA, 212 bp, Homo sapiens
ccaattaggagggcactggcccccaacaggcatcaccccgctaaatcccctagaagtcccactcctaaacacatccgtattactcgcatcaggagtatcaatcacctgagctcaccatagtctaatagaaaacaaccgaaaccaaataattcaagcactgcttattacaattttactgggtctctattttaccctcctacaagcctcagagt

SEQ ID NO: 1825 - DNA, 511 bp, Homo sapiens
acatgaattagaagcgtgcatctaggattatggccaaactgttttaaaaatgcagaaatgtaaaattacatcttgaaaatatgaagagatggtctacacacttcaaaaatcaaatgttgcttataccagagatgtatgacaatcacgggattcaagtgacaagcagtaagatctcaaaaattaatactggtcaaagataacgggaatatttttgcatttcactgaaaatacattgactactagaatacgaaatctagcaggagctcagggaaaaaaattacaaaatctaaagccaattacttaatatttcttattacctaaacaacagcatgacattaacagaaaactgcacctgcatttcaattgccaatctcacgttaattaagttctccaaaaatgaaatgcaaccaaaacgggttcaaactccaaatgaaagtctgcaaggctcagattaaaacatggaatgtttcagatgaaagtaataaaaacactattggttttgttctttatt

SEQ ID NO: 1826 - DNA, 515 bp, Homo sapiens
actaaggtggagagaaatgttaaggatttatctgtcattagacaatgcaaacacagtcacaatgtaaaaggttgttatcagtcttaacccctattttctaaaatacagcaatgtgagaaacatggacgaaagcagttcgagttgcaaactttggtcttcccccgcacctcaggggaagcacctatttgagactagcactaatacctacgacggcacatgcttagtaaacaagcactccaactagcaaagaatgtattcacaactgatttccaactctaccggaaaacttctcaataggggccactgcctacaattctttggtgttttgtggccaaatgtgttacttgtgcaccaaagagttttttaaaaagagatttgcctacgggtgagcactgaagtatacattgtgccaatgtaattattgtcttggagaccttctagaacttgctaaatcatatagcaagaagagaatgagttcaggcccagtaaatctggtgagttaatttacatctgtg

SEQ ID NO: 1827 - DNA, 470 bp, Homo sapiens
acaccaagcacctatttttataacttagcttcccatggagagataatggcttgcgtgcattttatgtatccataacatacatacaaggctcggtcttttcaatgggataacagttcacaactcttcgatttgaattgtaatgaatctggtgacaaggatttttctctaatggattccaaagttagccagaacttttaatgtcaaggtgaaaaagggtgtaaggtgttatattttcttcaattcctttaccacaggaggctaactccacaatttccctcatgtttctcattcagaaaaaaaaaatattaaatttgtgttcagaattatttgatgattgcttctttgtgctgatgtttcagttcctgaagtcaacttggctctcacaattttctaaggtcaggttattgacttagggttgtataaacatttttttctggtttttggattttcactaagaacgaccttccctt

SEQ ID NO: 1828 - DNA, 470 bp, Homo sapiens
accagtagatcagctgcctagcgagggcaggtttcttctttgcatctgtgtggcttgcttccagtctggcctgtcctttccagctgccttttgtctagcctgctatggggggccagattatcttgataagagcaggtgatttggggactagctgggttggcaggaaaagagcaggatggatctcttgggacaggttcccccaggagtataaacacaaggagccaggattgtgctggcagccaaggaaacagtagtgcctgtttgagttggcagagagggccttggcacctcttgcatccaggcagtcttgtgagatgggggcacatagcactggggaaagcagaactccattctcacctctattttgagcttcagtgctttatttcagtatgaggaaaaacaacaacaaactgaagtgcgctttccgtcctttcaaaggacaactgtcgggaagggagagccgagttgcg

SEQ ID NO: 1829 - DNA, 566 bp, Homo sapiens
acaggcatttattttggagtgatgaaaatgttttggaaatagttaaaggtggtggttgctcaacatcagtgaatgcaaccaaattgttcacttcaaaatggttaattctatgttacgtgaatttcacgtcgattaaaaaatatatatacaggttgagcatccctaatcagaaaatccaaaatgctccaaaatttcaaaatttctgaatgccaacatgacgctagaagtggaaaattccataactgatctcatgccagaaatcacagtcaaaatgcagtcgaaactttgtttcatgcacaaaattatttaaaatattgtatcaaattacctttaggctatgtatataaggtgtatatgaagcataaatgaatttcatgtttagtcttgagtctcatccccaagatatcgcatgtatatgcaaatattccaaaatctgaaattcaaaacacttctagccccaagcatttcacataagggatactcagactgtattgctgatcttgattcctgagttttttggagcccccttaattttgtgcctgaggcaaagccttacttgccacccc

SEQ ID NO: 1830 - DNA, 497 bp, Homo sapiens
actgactgagataagaaaagcctgaactatttattaaaaacatgaccactcttggctattgaagatgctgcctgtatttgagagactgccatacataatatatgacttcctagggatctgaaatccataaactaagagaaactgtgtatagcttacctgaacaggaatccttactggtatttatagaacagttgatttcccccatccccagtttatggatatgctgctttaaacttggaagggggagacaggaagttttaattgttctgactaaacttaggagttgagctaggagtgcgttcatggtttcttcactaacagaggaattatgctttgcactacgtccctccaagtgaagacagactgttttagacagactttttaaaatggtgccctaccattgacacatgcagaaattggtgcgttttgtttttttttcctatgctgctctgttttgtcttaaaggtcttgagggttgaccatgttgcgtcatcatc

SEQ ID NO: 1831 - DNA, 288 bp, Homo sapiens; identical to SEQ ID NO: 1705

SEQ ID NO: 1832 - DNA, 364 bp, Homo sapiens
acctaacaaacccacaggtcctaaactaccaaacctgcattaaaaatttcggttggggcgacctcggagcagaacccaacctccgagcagtacatgctaagacttcaccagtcaaagcgaactactatactcaattgatccaataacttgaccaacggaacaagttaccctagggataacagcgcaatcctattctagagtccatatcaacaatagggtttacgacctcgatgttggatcaggacatcccgatggtgcagccgctattaaaggttcgtttgttcaacgattaaagtcctacgtgatctgagttcagaccggagtaatccaggtcggtttctatctacttcaaattcctccctgt

SEQ ID NO: 1833 - DNA, 258 bp, Homo sapiens
cgagaaggaaaatggaattctggttcatactgtggtcccttgtaacctcaggtctttaatgtgatcactttcaaatttaaaagatccaggtggaaatatttttactatagtaataattctacaaaatacctgaattcttaacactgttatatttcagtataagtggtggctttttcttttcatgtctttgatctggttttattcctgtaattcagccacctgattttgtgaggggggggaataatatgtggtttttgt

SEQ ID NO: 1834 - DNA, 292 bp, Homo sapiens
aaagaaagaaaattcaattattagagatatatagaaaatatgagtgggctgggcatggtggctcacgcctgtaatcccagcactttgggaggccaaggcgggcggatcacctgaggtagggcattcaagaccagcctgaccaacatggagaaaccccatctccattaaaaatacaaaattagctgggcatggtggtgcatgcctgtaatcccagctacacaggaggctgaggcaggagaattacttgatcccgggaggcagaggttgtggtgagccgagatcgcgccattgt

SEQ ID NO: 1835 - DNA, 130 bp, Homo sapiens
catctctcctccttgcttggcaactgagtgctttgcccctgcatccccttctactagctctgctgcttggcagaggggctcaaccttgaggttttcattcacaattctactagggtttcaactggaaatt

SEQ ID NO: 1836 - DNA, 479 bp, Homo sapiens
  misc_feature 115: n = A,T,C or G
acctgtttagccacgatggccgccaggcggcccaggagatggcctcgaccatcaagcaccaggacctgcacctccgccatcttcgaccaagagatttgggcaacaactatgctgntaaataaaaataaacacaaaggttagaaatagcataaagtctgatgccttgtgcttttgcattagaaaaccattctgtttttaatatatcacactgattttgttctttttttgttaatgtataaattatcacagctcctgttaatagtgggaacccattcagaaaagccctgttctgacgctcttctatgttgctggcagaaatgcaaaaatgggacaaatccctataaaatatgtcaatatttatcattattataaatgcatttgtcttttgattctgcaatctcatatctagaattgtattccacagattcatctgtatatgtttccatgtgtaattattcattgagcattgtttttagtgc

SEQ ID NO: 1837 - DNA, 433 bp, Homo sapiens
accaagtaggcacccttgggcgcacccactggggccaggggtcgggggagtgttgggagcctcctccccaccccacctccctcacttcactgcattccagattggacatgttccatagccttgctggggaagggcccactgccaactccctctgccccagccccacccttggccatctccctttgggaactagggggctgctggtgggaaatgggagccagggcagatgtatgcattcctttatgtccctgtaaatgtgggactacaagaagaggagctgcctgagtggtactttctcttcctggtaatcctctggcccagccttatggcagaatagaggtatttttaggctatttttgtaatatggcttctggtcaaaatccctgtgtagctgaattcccaagccctgcattgtatttcgtcaaactgttat

SEQ ID NO: 1838 - DNA, 480 bp, Homo sapiens
accgctgtagagggctggggtcatgtgtggggaggctttgcagccccttggctgcccccattcccaggtcaccatcaaatacatcggagccagccccttcggagggtgccagtggagacctgggggcctcctcttcagagggctccagccctagtgtcaggtccccaccgccactctggggacaagaaagaaagtcatgatgggggtcactcacggatctgggatggggactccatggaaggtgacagggtcacaggagaaaaacagaggtcacctttggggtatgacacagtcaccgtggagagaatggggtcacaggggttggaaggcagtaagaattttttgtagggataatggggtttccttgagaggtgacagttgagggaacatcagagaaagggaccctagtccaccggggttgggggaggtaagcagacagccacacagtgtgaccgagggcactgaccctggtagatgagc

SEQ ID NO: 1839 - DNA, 468 bp, Homo sapiens
aagagaagaaatattgcagtgaatgaagattcctctgcattttagcactgctttttcaactgtagttggcttttgaatgaggatgacaatggaagagatgaagaatgaagctgagaccacatccatggtttctatgcccctctatgcagtcatgtatcctgtgtttaatgagctagaacgagtaaatctgtctgcagcccagacactgagagccgctttcatcaaggctgaaaaagaaaatccaggtctcacacaagacatcattatgaaaattttagagaaaaaaagcgtggaagttaacttcacggagtcccttcttcgtatggcagctgatgatgtagaagagtatatgattgaacgaccagagccagaattccaagacctaaacgaaaaggcacgagcacttaaacaaattctcagtaagatcccagatgagatcaatgacagagtgaggtttctacagacaat

SEQ ID NO: 1840 - DNA, 220 bp, Homo sapiens
acgagtcctccaggtaaatattacacaaatgggaagcatcttgaatttttaagtatatttcaatacataaatttttatgcatgctttaaacaaacagtattttttttaaatgagagaatctaacaaaaaagtctgaccagcaccagcatttaaattttctgattttaatattagtctgacatagcgttagtaaccatgctgcactgaaacatgtaatggt

SEQ ID NO: 1841 - DNA, 187 bp, Homo sapiens; identical to SEQ ID NO: 1764

SEQ ID NO: 1842 - DNA, 660 bp, Homo sapiens
  misc_feature 561: n = A,T,C or G
acagaattaaaaaagttcaaacaataattgtttggaaccacaaataattaaaaggaaacacagcaatcccataaacaagcattctggcatctgttagaaattttccctcaaattatgaaatgtagctctccatgctttccaatgattgttataatacccacaaatatctgtgatttcagtggaatactttaacaaaagttttctttttaaggcatgatcctgattcattttttcttcaatatctcagtcatttcaggaactaccttaaataaatctgcaactattccataatctgccacttggaaaattggagcttctgggtctttattaattgccacaattgtcttgctgtctttcatcccagctaaatgttggatggctccagatattccaaacctgcccgggcggccgcccgggcaggtctgaattaagcacagagttgaagtttatacccgtttcacatgcttttcaagaatgtcgcaattactaagaagcagataatggtgttttttagaaacctaattgaagtatattcaaccaaatactttaatgtataaaatnaaatattatacaatatacttgtatagcagtttctgcttcacatttgattttttcaaatttaatatttatattagagatctatatatgtataaatatgta

SEQ ID NO: 1843 - DNA, 447 bp, Homo sapiens
ggcggcgcgaaccatggccggggacagcgagcagaccctgcagaaccaccagcagcccaacggcggcgagcccttccttataggcgtcagcgggggaacagctagcggcaagtcttccgtgtgtgctaagatcgtgcagctcctggggcagaatgaggtggactatcgccagaagcaggtggtcatcctgagccaggatagcttctaccgtgtccttacctcggagcagaaggccaaagccctgaagggccagttcaactttgaccacccggatgcctttgacaatgaactcattctcaaaacactcaaagaaatcactgaagggaaaacagtccagatccccgtgtatgactttgtctcccattcccggaaggaggagacagttactgtctatcccgcagacgtggtgctctttgaaggaatcctggccttctactcccaggaggt

SEQ ID NO: 1844 - DNA, 527 bp, Homo sapiens
acggactctgcagatgtcttcacctcctcctgtggaatctaagccttgtgacctttccaatccagaatcaagggtagaggagtcttcctggaagaaaagtagatttgataagctggaagaattctgtaacttaataggagaggattgcctgggtctgtttatcatctttggtatgccaggaaagcctaaagacatcaggggagttgtcctggacagtgtcaaaagtcagatggtgaggagccatctgccaggagggaaggctgtggctcagtttgtcctggaaactgaagattgtgtgttcatcaaagagctgctcagaaattgtctgagtaagaaagacgggctgagagaggtgggcaaggtttatatcagcattctctgacttggatatgtattatgtgagtggcctgtaagaggaaaagaaaaaaagattctaataagcaagctcacctatttgcatcattccagcatgggattttttttcatttgttttcccattgattgaaaatgattactgggatcaaagt

SEQ ID NO: 1845 - DNA, 470 bp, Homo sapiens
acaaaggtgcaaaaaaggcatagcattttggttactgatatacacgtgtaggttttcaggaatgctgacaaattccagatataagggaaatgacagcacaaggaacactgacctacagataaactagatactgtccttcacaaagatgcatggggagttagcaaactgaggaagctgtggatatgttaagcccttcatcttgaggaatataatctatgtttaaaaaaccaaagctagtggctgagcacggtggctcacacctgtagtctcagcactttgggaggccgaggcaggaggatgacctgaggtcaggagtccaagaccaccctggccaacgtggtgaaaccctgtctctgctaaaaacacaaaaattagccgggcgtggtggcgtgcacctgtaattccagttactcagggagctgagacaggagaatcacttgaacccgggaggtggaggttgcagtgagctg

SEQ ID NO: 1846 - DNA, 185 bp, Homo sapiens
aaatgcttgagctttttctaccttccccttgcagtctgttgtgtgagcagcctgtttatttctctaatattatgtcagtttattctctttaatggactgtaaaaaaatgtaatcacaagagtgccaaatatcttgaaatgccaaaaggcattttagtttcttttctctgtgctctgagtccacgt

SEQ ID NO: 1847 - DNA, 488 bp, Homo sapiens
catcacctcagctaaccagaccgaagaagagaattggacggccgatggtggcctctcctaaccagaggcaccaggatcatctacgaccgaaagttcctgctggagtgcaagaactcacccattgcccggacacccccctgctgcctccctcagattcccggggtcacaactcctccaacagcccctctctccaagctggaggagctgaaggagcaggagacagaggaagagatacccgatgacgcacaatttgaaatggacatctaatccagtgcagatgacctggcatgtggagttacagagggatccctcatgccactgctgccaccacctcttcctggggcatccaaaggccagctggcctcatctaatctagaagggagtgacttgttagttccaggcctcctttagttctgaggcagctagaccagggataggagtgggcaacttgccaagcccttaactctacttcctcttcagtctgtggt

SEQ ID NO: 1848 - DNA, 522 bp, Homo sapiens
actttgtatttggccaaagcatcttctaggggctttcgaaattgtttagaaactgtattgaaactcggaaactgaatctgagcgaattgacaagtattaaggaggaacaaaacaatatctttccgaagccataatatctggaaggaaggaagctaaaacttgttagataaatcagactttcctacaaaagaggggtttggatagatgatctgaagaattcaggttatagcccagacaggttgcacactgaaattctaattcatttgagccttaattagaggtttatgggcacattatttttagatttgttgtattttattttcaaaatgaaaacaaactgaggaaataacataaacgtttactacttcataatttactcttactcctgtttggtaagttttatattattgtttctttaattgctaaagtaaggggaaatgaaattattgtttatcatattttgacttttcaaattaagcattttttcctttctatacactttgatttttatcatttctcctt

SEQ ID NO: 1849 - DNA, 231 bp, Homo sapiens
gcaaaatacctcaagcaaaatagaaactgaacattcaaaaagtatgtgttgtttaaaaagatgttgaagaccatttgagtaataagcacaggttataaaaatcacaattttattcttctacctttaacaagagaaggaatgatggcataatatttatatgctatattgtggcacgtataacaaacctttacaccacataacctggtttgctaaagaaaaaacaggtaaagt

SEQ ID NO: 1850 - DNA, 414 bp, Homo sapiens
ggctcgggacctgcggtacctgctgtagtcacgagggacgggcggcggcctggtcggcagagagtagcctgcaacattcggccgtggttacgatgagtttacccctcaatcccaaacctttcctcaatggactaacaggaaagccagtgatggtgaaacttaagtggggaatggagtacaagggctatctggtatctgtagatggctacatgaacatgcagcttgcaaatacagaagaatacatagatggagctttgtctggacatctgggtgaagttttaataaggtgtaataatgtcctttatatcagaggtgtggaagaagaggaagaagatggggaaatgagagaatagcatcttttgtgggggattttttttatatatatttctagacaataaagatttgtttgttttt

SEQ ID NO: 1851 - DNA, 366 bp, Homo sapiens
acaaattgtgtcctcagcttgcaaaataggagtgtttcatatttacaataggtacactagctattgagaacaatattttgggttgaggagagatggttgaggccattatttagtgggagcattggcattttgaacactgtaaacaaaagaacacttccgcctgctgtttgtaaaagctctttgggaagatcttttacgaagaccaactttttaaaatgtaaattacctacctaatataagtgtcctaagacatgtatgtaaacttccggaactgttttgtctgtgtatttagaaaatacacaagaatctttattcaaacctaaaaatataaacttgtgagcacgaaaaaaaaaaaaaaaaaaaaag

SEQ ID NO: 1852 - DNA, 92 bp, Homo sapiens
tactgctcggaggttgggttctgctccgaggtcgccccaaccgaaatttttaatgcaggtttggtagtttaggacctgtgggtttgttaggt

SEQ ID NO: 1853 - DNA, 570 bp, Homo sapiens
  misc_feature 501: n = A,T,C or G
acaggtcagagtcttcttttcttttctttttgagatggagtcttgctctgttgccagactggagtgcagtggtgcgatctgggctcactgcaatctccacctcccgggttcaagcgattctcctgcctcagcctcccgagtaactgggactacaggtgcgcgccaccaagcccagctcatttttgtatttttagtagagatggggtttcacgatgttggctaggatggtctcgatctctggtcagagtcttttctgtaaatatccttggtaaagaagcaattttagactgtagctgttgcaaatgctttaaggaagaagcaaaacaactgtcagtcttcctgaaatgaagaaactacaccagggctgctatatcagagcaaccccaaccagcactccaatcatgatgccgacagtggccccagctgagagaccaggagaagttccagatgcagagactgtgatgctcttggctatggaattattgcggccagtagccaagntagagacaaaacaggcataggtcccgttattatttggcgtgattttggcgataaagagaacttgtgtgt

SEQ ID NO: 1854 - DNA, 275 bp, Homo sapiens
agtaaagttacactctgaagggatatcatcctttcaaacgggccatctaaggcagctaattatgcattgcattggggtctctactgagaaaaattctgtgacttgaactaaatatttttaaatgtggattttttttgaaactaatatttaatattgcttctcctgcatggcaaaactgcctattctgctatttaaaaaccctcaatgactttattttctactgccgcctttttcatgtgcaaccaaaatgaaaatgtttaaattaactgtgttgt

SEQ ID NO: 1855 - DNA, 341 bp, Homo sapiens
acagaactcagaggaaaaaagaaattaaattttagctttctggagagcagcccctctctggcaccatcaaacacttctttgtttcccttcaacttggaactcttcaaacatcaggggttgtgagggtttggccattcttttatcttgggtccatgtgagtgacagaaatggtgcggcctgggaaagatctccctcctttacattttctcttctccctcctcctccttattctaaaactgtgcctccaacagaggggcaggggctcttgtagagagatccctggcccaggacaggagatgccaaatctaatttatctcactgagggcctttgagaaaaacgc

SEQ ID NO: 1856 - DNA, 464 bp, Homo sapiens
gttcacgcctgtaatcccaatactttgggatgccaaggcaggtggatcacttgaggtcagaagtttgagaccagcctggccaacaggtgaaaccccatctctattaaaatataaaaattagccaggcgtcgtggtgcatgcctgtaatcccagctacttgggaggctgaggcaggagaattgtttgcacctgggaggcggaagttgcggtgagccaagattgcttctctgtacagaagcacttcccctgctggtaagagttattcagtctgcggattctaagaccaaagaaaatgtcaatgctacagagaactgcatctcagcagtagggaaaatcatgaagttcaagcctgactgtgtaaacgttgaagaggtccttccacactggttgtcttggcttccactacatgaagataaagaagaagctgttcagactttcaattatctgtgtgacctgattgaaag

SEQ ID NO: 1857 - DNA, 537 bp, Homo sapiens
accaagatgacaattccctggcccatccaaatttatttatcgagaaagctgatgctgaggaaaaatggttcaagagattaattgctctccgacaagaaagactaatgggcagtcctgtggcctaagtaatatacatatagttggattggattgtcagcagtaacattggaaatttaggtttttaaatcccaatattaactttttactcttaaaaagaattttgctgattatatataaaggtagtctcatttcatttgtctctcatgtaggcttgaatatttgttaatttgaattaaatcaaacattgtaaaaattaaaacaaaatttaagattacatgaaaatgttatactgttaataaagctaaacataaataagtctgttaaaatgaatggtagacactagtgtttcttagtgcaattcaaaaaatgtcaagatgtcatttaaagacacaattttgattaattatgcatacatgagaattgaattacatgctataaatatgagatttcatcttccgtatggtattcaaccatttt

SEQ ID NO: 1858 - DNA, 502 bp, Homo sapiens
aaaacaacccagctctggagaaactgctgcctcatatccgggggaatgtgggctttgtgttcaccaaggaggacctcactgagatcagggacatgttgctggccaataaggtgccagctgctgcccgtgctggtgccattgccccatgtgaagtcactgtgccagcccagaacactggtctcgggcccgagaagacctcctttttccaggctttaggtatcaccactaaaatctccaggggcaccattgaaatcctgagtgatgtgcagctgatcaagactggaggcaaagtgggagccagcgaagccacgctgctgaacatgctcaacatctcccccttctcctttgggctggtcatccagcaggtgttcgacaatggcagcatctacaaccctgaagtgcttgatatcacagaggaaactctgcattctcgcttcctggagggtgtccgcaatgttgccagtgtctgtctgcagattggctacccaactgttgcatcagt

SEQ ID NO: 1859 - DNA, 416 bp, Homo sapiens
actctggtgagtcaccacttcagggctttactccgtaacagattttgttggcatagctctggggtgggcagttttttgaaaatgggctcaaccagaaaagcccaagttcatgcagctgtggcagagttacagttctgtggtttcatgttagttaccttatagttactgtgtaattagtgccacttaatgtatgttaccaaaaataaatatatctaccccagactagatgtagtattttttgtataattggatttcctaatactgtcatcctcaaagaaagtgtattggttttttaaaaaagaaagtgtatttggaaataaagtcagatggaaaattcattttttaaattcccgttttgtcactttttctgataaaagatggccatattaccccttttcggccccatgtatctcagt

SEQ ID NO: 1860 - DNA, 127 bp, Homo sapiens
  misc_feature 84, 98: n = A,T,C or G
acaagctttttttttttttttttttttttttttttttaagaataggtttaatttattagttgctctttagcaaaggctatatanaacattattggggngaaaattaaattctagttacagattcatg

SEQ ID NO: 1861 - DNA, 547 bp, Homo sapiens
acggttgaatgtcaatgtcaatttgtcaatcatctcagaagcattcttgctggcattgtccatggctgtcatcctggcactctgctcactagtggtggactccttcagagagtagtagatgatgttggccagattgtattcttggtaattttgcagcacgtcagcatcaatatcgtcatagatactcatgctgtcagcacttgcaacggtattaagggaaaagatgggcttttcttctgtcttataggagatgacagacctgaatttattaaagatgatggagccttcatcaaattcatatccagaatttagtaattcaagggcaatgactgacgcatctccaaaagtggggggctttcttcccacttctctgaatgccaccagaaactggtcagaatgagtcctataaagtatgcctctgattttgtcaccaattccaacaagcataacttctttcccagctgctgttagtgtagcaacctcgcttttcatctgtttagcaatggaggaatgaatagcaccacacagtcctcgatctgaggacaca

SEQ ID NO: 1862 - DNA, 392 bp, Homo sapiens
accccatgggccccatggtgtcccaggcccccatggacctcctgggcctccagggcctggaactccaatgggaccatacaaccctgcaccttataatcctggaccaccaggcccggctcctcatggtcctccagccccatatgctccccagggatggggaaatgcatatccacactggcagcagcaggctcctcctgatccagctaaggcaggaacggatccaaattcagcagcttgggctgcttattacgctcactattatcaacagtaagcacggccaccaccagcagcccctgcaggtgcaccaactacaactcaaactaatggacaaggagatcagcagaatccagccccagctggacaggttgattataccaaggcttgggaagagt

SEQ ID NO: 1863 - DNA, 95 bp, Homo sapiens
  misc_feature 18, 22, 26: n = A,T,C or G
tcgagcggccgccgggcnagtncagnctttttttttttttttttttttttttttttttttttttttttttttttttttttttttttttttttttt

SEQ ID NO: 1864 - DNA, 174 bp, Homo sapiens
gccgccaccaaaatgcagattttcgtgaaaacccttacggggaagaccatcaccctcgaggttgaaccctcggatacgatagaaaatgtaaaggccaagatccaggataaggaaggaattcctcctgatcagcagagactgatctttgctggcaagcagctggaagatggacgt

SEQ ID NO: 1865 - DNA, 441 bp, Homo sapiens
acatcgggggagaggagaggagaggggagcctctctgtgccttggtttcccatttgtgcattcagggcctctgcaggcctcacacagggagtctgaggggatagtgtttaagtgagcactcaggcttcctctgaggaaaagaaatgaccaaagtgcagacttttattactgccattcctgctcctaatgggagcaggagtcaaaaggaaaaacaaattaaaaggggctaatgagaaaggaggagagatgagacagagagtgtgaagggctatgccgctggcatctcataaattcttattgagaatggcacaggtattaaaaaagtttctgggtagtctacgagaaatgtcaattattatctctactacaaccacttacatatatctaatgggaaaagagtggggcttaggtgtcagagtggatgggagacaaaggagaagc

SEQ ID NO: 1866 - DNA, 548 bp, Homo sapiens
  misc_feature 520: n = A,T,C or G
acttgcgcttactttgtagccttcatcagggtttgctgaagatggcggtatataggccgagcaagaggtggtgaggttgatcggggtttatcgattacagaacaggctcctctagagggatatgaagcaccgccaggtcctttgagttttaagctgtggctcgtagtgttctggcgagcagttttgttgatttaactgttgaggtttagggctaagcatagtggggtatctaatcccagtttgggtcttagctattgtgtgttcagatatgttaaagccactttcgtagtctattttgtgtcaactggagttttttacaactcaggtgagttttagctttattggggagggggtgatctaaaacactctttacgccggcttctattgacttgggttaatcgtgtgaccgcggtggctggcacgaaattgaccaaccctggggttagtatagcttagttaaactttcgtttattgctaaaggttaatcactgctgtttcccgtgggggtgtggctaggctnaagcgttttgagctgcattgctgcgtgc

SEQ ID NO: 1867 - DNA, 118 bp, Homo sapiens
acctggagaagatcaaacagcgactgtttgagaatcttagaatgctgccgcacgcacctggggtccaaatgcaggcgattcctgaggacgccatccctgaggagagtggcgatgagga

SEQ ID NO: 1868 - DNA, 473 bp, Homo sapiens
  misc_feature 235, 276, 375, 466: n = A,T,C or G
accccggacccatccactcactcctgagagggctccggcccagaatgggaacctcagagaagagctctaaggagaagaaaccccatagcgtcagagaggatatgtctggcttccaagagaaaggaggctccgttttgcaaagtggaggagggacgagggacaggggtttcaccagccagcaacctgggccttgtcaagctttttttttttttttttttttttttttggcaaccanaaattctgatttaattagtccacataaagtctgggcatcanaatttttaaagctgcccaggaaagcctgatgttcagtcagtgttaggaaccacttaggtaaacagttttcttcatgacacctttaggagtcttcaaganagatacagtatgcagcatttccaaaatttgtcttcaaatcccttttaccatggaacatcttataacactgacttaggtaactcttcatctntgattgt

SEQ ID NO: 1869 - DNA, 53 bp, Homo sapiens
  misc_feature 25, 26, 27, 30: n = A,T,C or G
attgcaaataaattcttggacaatnnngtntggaaacttgatattaaaaacta

SEQ ID NO: 1870 - DNA, 559 bp, Homo sapiens
  misc_feature 505: n = A,T,C or G
acctgtccgagatgaactatgtgcaccgcgacctggctgctcgcaacatccttgtcaacagcaacctggtctgcaaagtctcagactttggcctctcccgcttcctggaggatgacccctccgatcctacctacaccagttccctgggcgggaagatccccatccgctggactgccccagaggccatagcctatcggaagttcacttctgctagtgatgtctggagctacggaattgtcatgtgggaggtcatgagctatggagagcgaccctactgggacatgagcaaccaggatgtcatcaatgccgtggagcaggattaccggctgccaccacccatggactgtcccacagcactgcaccagctcatgctggactgctgggtgcgggaccggaacctcaggcccaaattctcccagattgtcaataccctggacaagctcatccgcaatgctgccagcctcaaggtcattgccagcgctcagtctggcatgtcacagccccntcctggaccgcgcagtcccagattacacaaccttcacgacagttggtgattggc

SEQ ID NO: 1871 - DNA, 432 bp, Homo sapiens
cgccggaggaggagaccccattctataccaacacctattctgatttttcggtcaccctgaagtttatattcttatcctaccaggcttcggaataatctcccatattgtaacttactactccggaaaaaaagaaccatttggatacataggtatggtctgagctatgatatcaattggcttcctagggtttatcgtgtgagcacaccatatatttacagtaggaatagacgtagacacacgagcatatttcacctccgctaccataatcatcgctatccccaccggcgtcaaagtatttagctgactcgccacactccacggaagcaatatgaaatgatctgctgcagtgctctgagccctaggattcatctttcttttcaccgtaggtggcctgactggcattgtattagcaaactcatcactagacatcgt

SEQ ID NO: 1872 - DNA, 306 bp, Homo sapiens
actctgaggcttgtaggagggtaaaatagagacccagtaaaattgtaataagcagtgcttgaattatttggtttcggttgttttctattagactatggtgagctcaggtgattgatactcctgatgcgagtaatacggatgtgtttaggagtgggacttctaggggatttagcggggtgatgcctgttgggggccagtgccctcctaattggggggtaggggctaggctggagtggtaaaaggctcagaaaaatcctgcgaagaaaaaaacttctgaggtaataaataggattatcccgtatcgaa

SEQ ID NO: 1873 - DNA, 473 bp, Homo sapiens
acagacaaggtctatagaatgtggtaaaaacttgactgcaacacaaggcttataaaatagtaagatagtaaaatagcttatgaagaaactacagagatttaaaattgtgcatgactcatttcagcagcaaaataagaactcctaactgaacagaaatttttctacctagcaatgttattcttgtaaaatagttacctattaaaactgtgaagagtaaagaaaactaaagccaatttattatagtcacacaagtgattatactaaaaattattataaaggttataattttataatgtatttacctgtcctgatatatagctataacccaatatatgaaaatctcaaaaattaagacatcatcatacagaaggcaggattccttaaactgagatccctgatccatctttaatatttcaatttgcacacataaaacaattatataaacaactttgtaggactatgcccttttgtgt

SEQ ID NO: 1874 - DNA, 360 bp, Homo sapiens
acaacaatcacgtgttgacctcttaatattccaaggggatcaaaatctttttcaaacacagaaagaaactgggctttgtgcaatgctaaccccaatagctattctcctttataaaccacaatattattgtcagtttcgtatacttttactttataaagaactcctacaggaagaactttctggaggttgtcccagatataaacagctacattttcagtcgtgctcaccacatctgcaaagtatggcacatccatatccagattcttatgatcaaggggctgcataatcgcctcctccatatattttttgagatcagccagattcataaccattcccgtagcagggtcaatctctccatgt

SEQ ID NO: 1875 - DNA, 330 bp, Homo sapiens
  misc_feature 54, 66, 73, 90, 105, 132, 148, 162, 171, 183, 202, 206, 227,242, 260, 276, 287, 291, 308, 329: n = A,T,C or G
acaagctttttttttttttttttttttttttttttttttttttttttttggctntaaagggggtanagggggngctatagggtaaatacnggccctatttcaaanatttttaggggaattaattctaggacnatgggcatgaaactgnggtttgctccacanatttcaaancattgaccgtantatacccccggtcgtgtancggngaaagtggtttggtttaaacntccgggaattgcatntgtttttaagcctaatgnggggacagctcatgantgcaaaacgtnttgngatgtaattattatacnaatgggggcttcaatcgggant

SEQ ID NO: 1876 - DNA, 343 bp, Homo sapiens
ctcaaggacctcatcaacgaggcctgctgggatattagctccagcggtgtaaacctgcagagcatggactcgtcccacgtctctttggtgcagctcaccctgcggtctgagggcttcgacacctaccgctgcgaccgcaacctggccatgggcgtgaacctcaccagtatgtccaaaatactaaaatgcgccggcaatgaagatatcattacactaagggccgaagataacgcggataccttggcgctagtatttgaagcaccaaaccaggagaaagtttcagactatgaaatgaagttgatggatttagatgttgaacaacttggaattccagaacaggagt

SEQ ID NO: 1877 - DNA, 521 bp, Homo sapiens
cggaggtggattctgttagggacaggctgccccaggaccactccgcccccgctaactcaatgcagctgacccttaccctgaatactctgcagctgcattcctgaacccttacctaggcgccacagcaaggtcaccagacttgctgagcaaaaccctgattacagccccctgggcggcactggggaggtcacaagaaatgtggataaacctaagttacaccctcttgtaaattcctatattgtaagcccgtcaatgatatgcggtaaagtcaaccgacaaacaaccccagggtctctctcccccatataaacaccacactttttaagatcagggctgcctcctctgactgtggtggagcagcccaacaggtgaaggaacttactcacctgaccttggaggtgtgtctctgtctgtctgtctgtctgtctctctctctcgtcctttctttcagctaacctacaactaccacacctaaaacaagagttagacagtcacacaataatagggacttcaacatccaa

SEQ ID NO: 1878 - DNA, 397 bp, Homo sapiens
acaaccaaaacaacgtccttagtatcttaaggtttaagatttccgaaaagaaaaaagcccccccaaaacaacagtggcactacaaactgtgttctattctttcaaaacacagacactgcttatactatatccaaaacaaattagcacctgtttgctgttgctccccatataacttaacattgtgaagcatggtaattaaaaaaatcagctttcatatctattcagtctctgttgaatgtatagagtaataattccaccccctgccatttttacaattaaaacacaatttaaagttcttgttaaattagccccaaagtaatttttgggaatacagataggggaggaaacaaaacaaaaaatagaacatcgactcactgattaactgttttggtagcag

SEQ ID NO: 1879 - DNA, 397 bp, Homo sapiens; identical to SEQ ID NO: 1878

SEQ ID NO: 1880 - DNA, 453 bp, Homo sapiens
actattaacacaaaaataatttaaacagttcagtagcactagttcattcctctaggcttgttatttcatacacaggaggatgaaatcaacagtaaataacaccagttctgactttttttgtgtatgagtgaaaagatgtcaaaattattattaaacccaaataacaaatgataatgtgctgcatgaggctccactgctcctctggtataaagtatgtttcactcttgggtggcccctttctcagctactcagccccttgttggttctatccttactctctccacaagaaatacaagcagagaataaataaatcattttaaagcaggggtggaagcccttgcccttttcctttctaccttttaaaaaccttcagctctcatttgcatatttagggccgtagaccaacttacttacttattaagggaagcagggcccttaaggaatgaacagggt

SEQ ID NO: 1881 - DNA, 385 bp, Homo sapiens
  misc_feature 1, 3: n = A,T,C or G
ngnacactctaattatgtaaaatttttatctgtcaacttaaaataaaaagttaaccaaacaaaagttaatctaactgtaaacaaaacaaaataaaacgtggagtttgtctcacctgacactaactagaaagtaactaacttaaagatggtcttgtagaaatctttcctttaattatttttctttgagcattaataatccatcatcaattaaatttttcttacttttattatgattttgttttcatttttttccactgacatcttctatatcagatctagtttactggtattttaaattctaaataaaccataaaaaagttgattttactgctcaataccaagaaaacagatttcttaaagcaatgccagaaggcatcctgtgcgt

SEQ ID NO: 1882 - DNA, 451 bp, Homo sapiens
acaaaagcagttataaaccatttatattacacagaattattcaggtctccattctatcttatgttgtaaaattgttaattggatttccagtgagttgtttagatgattagtgataataaggaatggtaaatccatagcaccatttcaaagacttgttgtcactgatttctcatttagatgtgtgacgaagatactccacctgtaagggcaagtatgccaatgccacaagccgtgtttttgcgagggctccagtttgggcattttgtccgtgtgcgcgtaaagcttcacacagaggttcgggcagcggctgtttctgttggatgcactgggtcacccaccagaaaagggcttttggacatttggggtttctacccacactttggttttctaaatgaggtggactgggagggaggtatcttctttcagatgaaagggaaggggcgagatggag

SEQ ID NO: 1883 - DNA, 508 bp, Homo sapiens
ctgggatctgtgcagggatttgaagatacaaataaatccgagagaactgagagtctggaagcaggagatgacgagtccaagttagatgatgcacattcattaggctctggtgctggagaaggatacgagccaatcagtgatgacgaactagatgaaattctggcaggtgatgcagaaaagagggaggaccaacaggatgaggagaagatgccagatcccttagatgtgatagatgtggattggtctggtcttatgccaaagcatccaaaagaaccacgagagcctggggctgcactcttaaaattcacacctggagctgttatgctaagagttgggatttctaaaaagttggcaggttctgaactctttgccaaagtcaaagaaacatgtcagagacttttagaaaaacccaaagatgcagacaatctctttgaacatgaattgggggctctcaatatggctgcattactacgaaaagaagaaagagcaagtcttcttagtaatcttg

SEQ ID NO: 1884 - DNA, 328 bp, Homo sapiens
acaggtctttgcggatgtccacgtcacacttcatgatggagttgaaggtggtctcgtggatgccgcaagattccatacccaggaaggaaggctggaacagcgcctccggacaccggaaccgctcattgccaatggtgatgacctggccatcgggcagctcgtagctcttctccagagaagaggaggatgcggcggtggccatctcctgctcgaagtccagggcgacgtagcacagcttctccttgatgtcgcgcacgatttcccgctcggccgtggtggtgaagctgtagcctcgctcagtgaggatcttcatgaggtagtcggtcag

SEQ ID NO: 1885 - DNA, 357 bp, Homo sapiens
actgaagagctattacaatccaaatattgccgtttcataaatgtaataagtaatactaattcacagagtattgtaaatggtggatgacaaaagaaaatctgctctgtggaaagaaagaactgtctctaccagggtcaagagcatgaacgcatcaatagaaagaactcggggaaacatcccatcaacaggactacacacttgtatatacattcttgagaacactgcaatgtgaaaatcacgtttgctatttataaacttgtccttagattaatgtgtctggacagattgtgggagtaagtgattcttctaagaattagatacttgtcactgcctatacctgcagctgaactgaatggt

SEQ ID NO: 1886 - DNA, 361 bp, Homo sapiens
atcgttctgcagattgacaatgcccgtcttgctgctgatgactttagagtcaagtatgagacagagctggccatgcgccagtctgtggagaacgacatccatgggctccgcaaggtcattgatgacaccaatatcacacgactgcagctggagacagagatcgaggctctcaaggaggagctgctcttcatgaagaagaaccacgaagaggaagtaaaaggcctacaagcccagattgccagctctgggttgaccgtggaggtagatgcccccaaatctcaggacctcgccaagatcatggcagacatccgggcccaatatgacgagctggctcggaagaaccgagaggagctagacaagt

SEQ ID NO: 1887 - DNA, 368 bp, Homo sapiens
acatattttattagagtaaaaaaagttcatcttcatattttaagaataaaaattttgttcacttaaaaaatcatgagtagctgttacatttggttaaatgccttctcatgatcatgtgattgtttttctcttcagagctattaaaatgatgaaatttataaattgttttattaataatgaaccgtaattgtatttttgagagaaggataacttgtttatgatgtcttactctgttttcatttcctgctagattctgtttgataatatttatttaagattttggcatctaattataagtgagattatcttgttgtgtattggtcttgttatacttactttataacaataaaataatattgaagttctca

SEQ ID NO: 1888 - DNA, 531 bp, Homo sapiens
  misc_feature 303, 357, 513: n = A,T,C or G
acttgtcctagcgttttggaagaggaaaacaggaacccaccaaaccaaccaatcaaccaaacaaagaaaaaattccacaatgaaagaatgtattttgtctttttgcattttggtgtataagccatcaatattcagcaaaatgattcctttctttaaaaaaaaaaaatgtggaggaaagtagaaatttaccaaggttgttggcccagggcgttaaattcacagatttttttaacgagaaaaacacacagaagaagctacctcaggtgtttttacctcagcaccttgctcttgtgtttcccttanagattttgtaaagctgatagttggagcatttttttatttttttaataaaaatgngttggaaaaaaataagatatcaactgccagcctggagaaggtgacagtccaagtgtgcaacagctgttctgaattgtcttccgctagccaagaacctatatggccttcttttggacaaaccttgaaaatgtttatttaaaaaaaaaaaagatgacnaagaaaacagagagagag

SEQ ID NO: 1889 - DNA, 360 bp, Homo sapiens
  misc_feature 34, 82, 126, 205, 262, 278: n = A,T,C or G
acaagctttttttttttttttttttttttttttngaaactgagtctcactctattgctctattgcccaggctggagtgcagnggtgcaaacagctcactgcgcaaacacagctcactgcagcctcnacctccagggctcaagtgatcctcagccttccatgtagctgggattataggcattagccactgtgcccggcctaaacanatgctttctaagtatatgtcttttactattatttcagtaagaaaaatgaaacagaanaattttgttttattanaataaaaaattaaatgcaaaaatgtaatttttaactttaaaatgattcagtctaattaatacaggtaaacatttatgaatgt

SEQ ID NO: 1890 - DNA, 149 bp, Homo sapiens
cctaaacacatccgtattactcgcatcaggagtatcaatcacctgagctcaccatagtctaatagaaaacaaccgaaaccaaataattcaagcactgcttattacaattttactgggtctctattttaccctcctacaagcctcagagt

SEQ ID NO: 1891 - DNA, 385 bp, Homo sapiens
  misc_feature 1, 39, 150, 157: n = A,T,C or G
nggacactctaattatgtaaaatttttatctgtcaactnaaaataaaaagttaaccaaacaaaagttaatctaactgtaaacaaaacaaaataaaacgtggagtttgtctcacctgacactaactagaaagtaactaacttaaagatggncttgtanaaatctttcctttaattatttttctttgagcattaataatccatcatcaattaaatttttcttacttttattatgattttgttttcatttttttccactgacatcttctatatcagatctagtttactggtattttaaattctaaataaaccataaaaaagttgattttactgctcaataccaagaaaacagatttcttaaagcaatgccagaaggcatcctgtgcgt

SEQ ID NO: 1892 - DNA, 393 bp, Homo sapiens
tgcccatctacgagggctacgccctcccccacgccatcctgcgtctggacctggctggccgggacctgaccgactacctcatgaagatcctcactgagcgaggctacagcttcaccaccacggccgagcgggaaatcgtgcgcgacatcaaggagaagctgtgctacgtcgccctggacttcgagcaggagatggccaccgccgcatcctcctcttctctggagaagagctacgagctgcccgatggccaggtcatcaccattggcaatgagcggttccggtgtccggaggcgctgttccagccttccttcctgggtatggaatcttgcggcatccacgagaccaccttcaactccatcatgaagtgtgacgtggacatccgcaaagacctgt

SEQ ID NO: 1893 - DNA, 268 bp, Homo sapiens
  misc_feature 13, 49, 56, 128, 211, 238, 243: n = A,T,C or G
aatataattcttncaattttatttttcttttaaaattattttgactatngtatcantgttacctttccatttaaattttaggattagcttagctacaaaagtcctgctgggagagtgattagaattgnattaaatctatagataagtttggggagaattaacatatttatgatcgccttttaatccgtgaacatgacgtgtctctccattnatttgcatgtttagtttctttcttcancattntatagttttagcatacagatcttgt

SEQ ID NO: 1894 - DNA, 340 bp, Homo sapiens
ggatgtagtgttgaaagtagatgctcaggaggcaaaaactgagccttttacacaagggaaggtggtggggcagaccaccccagaaagctttgaaaaagctcctcaagtcacagagagcatagagtccagtgagcttgtaaccacttgtcaagccgaaaccttagctggggtaaaatcacaggagatggtgatggaacaggctatcccccctgactcggtggaaacccctacagacagtgagactgatggaagcacccccgtagccgactttgacgcaccaggcacaacccagaaagacgagattgtggaaatccatgaggagaatgaggtcgcatctggt

SEQ ID NO: 1895 - DNA, 429 bp, Homo sapiens
  misc_feature 243: n = A,T,C or G
cacttctccatcacaaccagatttgaggctggttttgatggctgggtccttgggcctggccagccttcctcttagcctctggatctagaagggaccataagaggagtaggccctggttcctgctgtcctggtggctgggcccagcaggggccctcactcttgaagtccaggactgggtctgacctggtgggagcacctgccagaggatgctctttcccaggacggatgggccctgtgtctcangagtggggttgggggacagccttcagcagcagctcacaccctaccttccccagacttgcactggggtgggatttggagtgatgggaaggtttttaagggccggggatggatcttttctaaatgttattacttgtaaataaagtctatttttctcccgtaaaaaaaaaaaaaaaaaaaaaaaagctt

SEQ ID NO: 1896 - DNA, 469 bp, Homo sapiens
  misc_feature 9, 11, 12, 17, 33, 78, 84, 107, 175, 235, 280, 282, 362,379, 402, 433: n = A,T,C or G
agcgtgggncnnggccnaggtcacctgcccgancccgacgctatgtccagcaaaggctccgtggttctggcctacagnggcggnctggacacctcgtgcatcctcgngtggctgaaggaacaaggctatgacgtcattgcctatctggccaacattggccagaaggaagacttcnaggaagccaggaagaaggcactgaagcttggggccaaaaggtgttcattgaggatgtcancagggagtttgtggaggagttcatctggccggccatccagtccancncactgtatgaggaccgctacctcctgggcacctctcttgccaggccctgcatcgcccgcaaacaagtggaaatcgcccancgggagggggccaagtntgtgtcccacggcgccacagganaggggaacgatcaggtccggtttgagctcanctgctactcactggccccccagataaaggtcattgc

SEQ ID NO: 1897 - DNA, 374 bp, Homo sapiens
acaagaaagtatggtgcaacagcaacactccagcagatgttatagtgtgctacgggagcccaggagaaggcggagtgatcaattttggggaagacaagatgtggcagaagcgttcacaaaagtaatggtgtctgagcagggttctaagggatgcataggagttctctggcagatggttggggaaactttcaggctgaggaaatatctcaagcagacatgtagaggtatgaaagacacagggcagaggtgccggggcatggctctgtgagggcacgggtatgaggctagaggagccctgggtctgcctttacttacccgggtctgctctagccctagccctcgggagtcagggaaggggaattgcctaagtaaca

SEQ ID NO: 1898 - DNA, 482 bp, Homo sapiens
acaagtattcttgatctcagagacaagttcaatgaatctcttcaagtgaatactactgctctcatcccaaaggaagccaactctgaggaagtctttttgtttaaaccagaaaacattacttttgaaaatggcacagatcttttcattgctattcaggctgttgataaggtcgatctgaaatcagaaatatccaacattgcacgagtatctttgtttattcctccacagactccgccagagacacctagtcctgatgaaacgtctgctccttgtcctaatattcatatcaacagcaccattcctggcattcacattttaaaaattatgtggaagtggataggagaactgcagctgtcaatagcctagggctgaatttttgtcagataaataaaataaatcattcatccttttttttgattataaaattttctaaaatgtattttagacttcctgtagggggcgatatactaaatgtatatagt

SEQ ID NO: 1899 - DNA, 253 bp, Homo sapiens
acaaatctggggtttggccattaaaagttatttacaacagtgggagaaaaaaagacaagaagttgtttcacattacagacctccccccaccccaaagcctaatacttgcttaccaagtcaaaaaagagacacagttgattcacaggctggaggtttgaacttgagtaagacatttataaaaacctagacggggcagtgtcctccccagcccaggtgccactaggcacagcacaagagactaaaaacaacaggg

SEQ ID NO: 1900 - DNA, 158 bp, Homo sapiens
tacagcgattcaaagatgtcattgtctccgggacagttgtaatggcaggcacaggtcttgatgaacatcatgttcttcttcatgacctcgccgtcagggcacttgaactccaccggcagggtagtggttctgtggggggtgcagcatcggccgtcggt

SEQ ID NO: 1901 - DNA, 540 bp, Homo sapiens
acacggagaaggtcaatgaataggagaagatgaagaaaattatttcctctttaggatatacaaaagcattgaaaaaataaagcattctaaagcgctgcttactaatcaagatgaacagaatgcataggatataaagcatactgcatataaagcaatctcccctccttgacatatacatgaatgggcatgggtgtctatgtcttatgaacatgtaatttattaggcagtatgcaaaggggttacattcttattggcagaagaatagacatcctgggagaatacaataatccaaaattagactgatttaaaaaattaatgtatgactgcacatgacatcaaaacattctcaggtatattaaagagttaaccattaaaaataggaacatgacaataagcaactgaattctcaaaaattctgtgaagagaaagtaactttaaaaacaaatcacacatgcaaaaaaatatttgatataaaaatgtaacatttctgcttgtaaaaaaaaacctttcatcagaaacaaaattttcaatattataaca

SEQ ID NO: 1902 - DNA, 494 bp, Homo sapiens
acacggagaaggtcaatgaataggagaagatgaagaaaattatttcctctttaggatatacaaaagcattgaaaaaataaagcattctaaagcgctgcttactaatcaagatgaacagaatgcataggatataaagcatactgcatataaagcaatctcccctccttgacatatacatgaatgggcatgggtgtctatgtcttatgaacatgtaatttattaggcagtatgcaaaggggttacattcttattggcagaagaatagacatcctgggagaatacaataatccaaaattagactgatttaaaaaattaatgtatgactgcacatgacatcaaaacattctcaggtatattaaagagttaaccattaaaaataggaacatgacaataagcaactgaattctcaaaaattctgtgaagagaaagtaactttaaaaacaaatcacacatgcaaaaaaatatttgatataaaaatgtaacatttctgcttg

SEQ ID NO: 1903 - DNA, 454 bp, Homo sapiens
  misc_feature 34, 65, 67, 259, 273, 448: n = A,T,C or G
acaagcttttttttttttttttttttttttttgnattcaatgttgtttattgaggagtgaatgananactactgccagacatgccaatgacacttcacattcaagggctggaagctggaaagcttcccgactgagtcactgtataagccttctgggaaaaagaaccaaagtgacatcaaatatgccatcttcatgcttgttgtctgtcatcagtttttttcaacttttgggtctactggtttgctgggtaggaggcttntttctaccctacanaaagactcacactcccaattcacaatgaacactgaatgcagagcaatttgtgtgaacacacatctacgctgagtaactgttcttaaagctgtttttccttaaatttccttatgtctaacgagaaaaattaatttgatttccctttccccttcaggtgggcgggttataccaatanaaaaat

SEQ ID NO: 1904 - DNA, 398 bp, Homo sapiens
accatgaaatacatatatttcataaggttcagttacaaaatggattgtttcaaatggcaatttcttacactaacctgattatgaaaaaaagaagtctgtatcatctgcttccaagtctgttatgtccaaatatattttaattatgcatttattttgctacttttataaatattagagatttcaccttaaattatttttgtaactagttctagaacatgttttccaattattatttttctaatggagacatataattgacctatgtttatgcatatatgttctctacacagtgaaactttttttaaaaagaatagtaaagaaaatgcggaagctctggctctccaaggcaaagtcaaaaaaaaaaaaaaagcggggggggaatgcgaggaacattttat

SEQ ID NO: 1905 - DNA, 454 bp, Homo sapiens
gccgagaagaaggctgctggcaaaggggacgtcccaacgaagagaccacctgtccttcgagcaggagttaacaccgtcaccaccttggtggagaacaagaaagctcagctggtggtgattgcacacgacgtggatcccatcgagctggttgtcttcttgcctgccctgtgtcgtaaaatgggggtcccttactgcattatcaagggaaaggcaagactgggacgtctagtccacaggaagacctgcaccactgtcgccttcacacaggtgaactcggaagacaaaggcgctttggctaagctggtggaagctatcaggaccaattacaatgacagatacgatgagatccgccgtcactggggtggcaatgtcctgggtcctaagtctgtggctcgtatcgccaagctcgaaaaggcaaaggctaaagaacttgccactaaactgggttaaatgt

SEQ ID NO: 1906 - DNA, 181 bp, Homo sapiens
actactggagaaaaagggctcatgatcttaatgccagcattaagacagacagaagcagcatggtgctaaatgacagaaaaatccagtatttacattaggatggtaacaggaacatttaagagcatttgatcttatttactggtggaccgaaagcccttagctagacaatagaggaaaatgt

SEQ ID NO: 1907 - DNA, 398 bp, Homo sapiens
tgcaaattgctccatgttcttctctcccttatgtaacatctcctgagggtgtttagttgcatggctgttcagaaaggtattaagggcttaggccaaatcttactttgagtatgttaaaaaaaaaaaaatgctgctggcttttctgaagacaggtgcttgaacttgtcagtttgttttaaataaatacaatagttgaaaatttttctctgttacatcagtaatattgttaaagtaatggatagaaccataacttacacatgaaagtcatatactagatccaatactatttagtttattattgaaattggaaggattcattgagcagcatagaagtttgtttacatgttactttgagatgctaggtatttgtggaattaaaaagaatcaggctcttttgt

SEQ ID NO: 1908 - DNA, 437 bp, Homo sapiens
acaggggcacagtcatggctcagtgcagcctggaactcccaggcttaagtgatcctcccacctcagcctcctgagtagctgggactacaagcatgtgccaccacaccctgctaatttttttatttttatttttgtagagacagggtcatgctatgttgcccaggctggtctggagttcctggactcaggccatcctcccacgtcggcctcccaaagtgctgggattacaggcatgaaccactatgcctagctcataagctttttgcctggcagcagctggagccaggagccaacattgaagggttataattttatgctcctctggctccaccatcaaatgaatgggcacccatcctcctctcccaccaagctgtgcctggcaggtggatgggtgtggacttttccaaagactgacattcttgcgggggactgggatt

SEQ ID NO: 1909 - DNA, 487 bp, Homo sapiens
  misc_feature 468: n = A,T,C or G
acattgtataatgatcaaatcaggatatcacctcaaaccttatgatgatcttacagttaaagatgatatattcttgcaaagtgtctgttcagatcttttgctcccctttttattggattattccttttcttactgtttttatatgttttttaatatattgatacaaatcctttgtcagatacattatttggaaatagattttcctagtctgtgacttgtcttttcattctttgaacactgacttttttagagcaaaaattttaattttgatacaattcactttatcaatttttttacttttgatgtgcaatgtaagaacacttgtctaacccaatgtcatgaagattatatattattttcatccaggaattttatagttttaagttttacatttatatctatgatactttttgaataaaggtttgtataaagtttagctatgggtcaaggttcagtttttaaaatatngctatctaattgttctagt

SEQ ID NO: 1910 - DNA, 520 bp, Homo sapiens
cctgcttgtcccttttttagaaaacacttttaaactttttaaaaattttaaaccttttttcagcagatatggagagagctgacaatcaattcacattttttaagccattttagctaaactgtcattgtgcatctctgaggttccctcatggagctccacagatccatttttagggaagggattttggctcaaaacgatctgaccacctctgccctgtccaccaggataagtgacacctaggacccaggaaataaatgccgatgatttgcaaaaaaaaaaaaaaaaaaaaaaaaaaagcttgtacctgcccgggcggccgcccgggcaggtacaaaagcaggatttcacccatgagctactgtggtttgccgacccttgctctgtgctatcatcctgttatattttcatcatctcgccgaaatcagaaattatcttatttattcgttctaaaatttgttgttggtggcaaagaggttgaatagaagttataagtaagagttaaaaatatattttaaaattg

SEQ ID NO: 1911 - DNA, 553 bp, Homo sapiens
gcagatctcagccctctactgagtcccttagccaagcagcttctttcaaagaagccagcaggcgaaaagcagggactgccactgcatttcatatcacactgttaaaagttgtgttttgaaattttatgtttagttgcacaaattgggccaaagaaacattgccttgaggaagatatgattggaaaatcaagagtgtagaagaataaatactgttttactgtccaaagacatgtttatagtgctctgtaaatgttcctttcctttgtagtctctggcaagatgctttaggaagataaaagtttgaggagaacaaacaggaattctgaattaagcacagagttgaagtttatacccgtttcacatgcttttcaagaatgtcgcaattactaagaagcagataatggtgttttttagaaacctaattgaagtatattcaaccaaatactttaatgtataaaataaatattatacaatatacttgtatagcagtttctgcttcacattttgattttttcaaatttaatatttatattagagatctatatatgtataa

SEQ ID NO: 1912 - DNA, 431 bp, Homo sapiens
  misc_feature 403: n = A,T,C or G
cgagtagctgggattacaggggcacgccaccacacccagctaatttttgtatttttagaagagacggggtttcaccatgttggccatgatggtctcgatttctgaccttgtcatccgtccgccttggcctcccaaagtgctgggattacgggcgtgagccacctcgcccggcctctttgcagtatatttttaaatcaggtagtgtgaggcttctagctttgttctttttgctcagtattgctttggctatttggggtcttctgtggttccatatgaatttcagggtttttttttcctgtttctgtgaagaatataattgatagggattatactgaatctctagattgcttcgggtagtatggtcattttaacagtattagttattccaacccacgagcataangatgcctttccatttgtttgtgtccttc

SEQ ID NO: 1913 - DNA, 382 bp, Homo sapiens
ttttgaatgcaagttgcctttattataaatttgagtttgtcttggttataccttgcatgataacctagctagatttctagcatttgctgtatttattaaaattattatttttttggtaaaacattaatagtttaagcagcatcatttttttaaaaaatgtaattgaataagtgtgaatgcagaagcaaatattgtctgccctgttaaacttggtgcccattaacagtgtttacactgttcatcgtgcctgttaatgtagttttagttactggagcttttttaagactagatttggttttgagttacatttttaagaatgtgggaatatatttaagtttaatgtagtcctagtgctcttgaaatggtgcccctttcatttggt

SEQ ID NO: 1914 - DNA, 534 bp, Homo sapiens
  misc_feature 515: n = A,T,C or G
accaggaaggtggtgtggagtcagcatttcacaagacctccacaggagccccagctgccatcaagaaactctaccaggtgaaggggaagaagaacatccgtgccaccgagcgggcactgaactgggacagcttcaacactggggactgcttcatcctggacctgggccagaacatcttcgcctggtgtggtggaaagtccaacatcctggaacgcaacaaggcgagggacctggccctggccatccgggacagtgagcgacagggcaaggcccaggtggagattgtcactgatggggaggagcctgctgagatgatccaggtcctgggccccaagcctgctctgaaggagggcaaccctgaggaagacctcacagctgacaaggcaaatgcccaggccgcagctctgtataaggtctctgatgccactggacagatgaacctgaccaaggtggctgactccagcccatttgccccttgaactgctgatatctgatgactgctttgtgctggacancgggctctgtggcaagatc

SEQ ID NO: 1915 - DNA, 531 bp, Homo sapiens
acttcagttggtgcacaaaatactgtcatttgctcaaagctggctgccaaatgtttggtgatgaaggcagaaatgaatggctcaaaacttgggagaagagcaaaacctgaaggggccctccagaacaatgatgggctttatgatcctgactgcgatgagagcgggctctttaaggccaagcagtgcaacggcacctccatgtgctggtgtgtgaacactgctggggtcagaagaacagacaaggacactgaaataacctgctctgagcgagtgagaacctactggatcatcattgaactaaaacacaaagcaagagaaaaaccttatgatagtaaaagtttgcggactgcacttcagaaggagatcacaacgcgttatcaactggatccaaaatttatcacgagtattttgtatgagaataatgttatcactattgatctggttcaaaattcttctcaaaaaactcagaatgatgtggacatagctgatgtggcttattattttgaaaaagatgttaaaggtgaatccttg

SEQ ID NO: 1916 - DNA, 487 bp, Homo sapiens
  misc_feature 472, 481: n = A,T,C or G
acacaagtattaatgttttctatgaaaagattagaaggctgggtgtggtgcctcacacctgtaacccagcactttgggaagctgaggtgggcagatcgcttgagcccaggagtttgagaccagcctgggcaacatggtgaaactccatctctactaaaaatacaaaaactagccaggcatggcggcgtgtgcctaaagtcccagctacttgaaaggttgaggtgagagggttgcttgagctgggaaggtcaaggctgcagtgagctgcgatagtgccactgcactccagcctgggtgacagagcaagaccctgtctcaaaaacacgaaacctccgtggtgacggggacggtggagcagggcaccctggtctcattgcgaggggtgcaggtcttgcagcatccattgggcatgaatgtgatggagcccgggatgcaaatgctggcatcaaagttggggcaggtgatgttgganacggacganatgagc

SEQ ID NO: 1917 - DNA, 247 bp, Homo sapiens
accatttggccagaggtccataaataatattaacattttcaatgtagaaatcttgaagttctaaagggaaatattgctcagtagataaattctcctggaatttcttgtagcaaaggttcctcaaatttaaatcgtttggaaatggccttttgctccattttctctttttcagactgtctgcattgtcctagagtatatgaagtaactacaattaactcttcggttacaatggattccttggtttctg

SEQ ID NO: 1918 - DNA, 306 bp, Homo sapiens
acggaaaaccactttcatatccgctggaaattcatgtaaaagttaaagatattaatgataatccacctacatgtccgtcaccagtaaccgtatttgaggtccaggagaatgaacgactgggtaacagtatcgggacccttactgcacatgacagggatgaagaaaatactgccaacagttttctaaactacaggattgtggagcaaactcccaaacttcccatggatggactcttcctaatccaaacctatgctggaatgttacagttagctaaacagtccttgaagaagcaagatactcctcagt

SEQ ID NO: 1919 - DNA, 193 bp, Homo sapiens
acttaagagtcccccagacctcctgtgaggtgaggctctgttgcagtgtcgtaggctgtgtgtgtctgtaaagaaagaatgcacatatgtagacgattaagtgtatattataagctatatgctgaaaatggcttccatagccatgagaacatcttaaaactatgtgtaaatatattaaggaaagtatagcttg

SEQ ID NO: 1920 - DNA, 184 bp, Homo sapiens
  misc_feature 101, 167: n = A,T,C or G
tttttttttttttttttttttttttttcttttttttttttatctggccattttttaggttttgttctgttttgttaaaaaaaagaaaaagaagaaaagacntcatggccaactggtaggttcctaagtctccttccatccagtcaagccaaaaaatgcccaggggantagggaggtgtggggag

SEQ ID NO: 1921 - DNA, 326 bp, Homo sapiens
actcttggagcccgctactgtcgttattgatcacatctgtgtgaagccaaagccccgtggttgcccatgagaagtgtccttgttcattttcacccaaatgaagtgtgaacgtgatgttttcggatgcaaactcagctcagggattcattttgtgtcttagttttatatgcatccttatttttaatacacctgcttcacgtccctatgttgggaagtccatatttgtctgcttttcttgcagcatcatttccttacaatactgtctggtggacaaaatgacaattgatatgtttttctgatataattactttagctgcactaacagt

SEQ ID NO: 1922 - DNA, 435 bp, Homo sapiens
actatcatcccccaaggccttttacagtctgaaatatcaaaattgaaagcaaaaataggatgaccaaaggactactattttacctcttttcagaactctacaatagtagaaactaaattcccttatggatctcagggggaaataatgtgcctgttgaaggggctcagtgtttggtgtccaggctggcatttttcaggtgagggtttcatactgacaggaggcaggctcctaaaacaaggcggtagcaccagcgccatgactagggctgctttaaaacaaatttctaggacttacgctctttgggcctgatttgttaatgcttatgaggtaatgatattatgtttgagaagctctacttctagtatacctcaatgctcagagagaaagccaacaatacaatcaggaaaccacaatattgacaaaacttagtacctg

SEQ ID NO: 1923 - DNA, 418 bp, Homo sapiens
cattttccccagctaaatcataacataaaaattactgtcattcctttaaaaaaaaataagcaaatgcaatctccttatcaaaatattaagaaggaaggaaggatatagtttcaaaatagtcccttaagttgaggaactctagctttaaacatgttttttaaattttcattttgcttttaaccagtgaaaacttcatatagaatgagcttcaatttgtgtgccagtgtttaggcacttgaggttagcaaaacaaatcctttatactgcaatttgtttcctcatgtgtatttttacaggtgaatatttatcgtctagttacaaagggatcagttgaagaagatattcttgaaagggcgaaaaagaagatggttttagatcatcttgtaattcaaagaatggacacaactgggaagacagt

SEQ ID NO: 1924 - DNA, 316 bp, Homo sapiens
actcagaaagggattagaaaataattacaaaaatattttgccacatattaacatgaaactacaatcactggctgtaaaatatagtcaaatgcaatcaagctgaaaagaaaaggtggaaatctccaggttatctgcccaggtggcaggaaatcgacagccccgagaacgcaagtgctgctgtgccgccaggcccagggctatgatccaaagtgacgggcagactaccggcctgcaccaccccactcaggctgcacacaagacagccagcttaggatctccgtgggctgctacctatgtcacagagggctgattaagg

SEQ ID NO: 1925 - DNA, 508 bp, Homo sapiens
actgttcctgttggccgagtggagactggtgttctcaaacccggtatggtggtcacctttgctccagtcaacgttacaacggaagtaaaatctgtcgaaatgcaccatgaagctttgagtgaagctcttcctggggacaatgtgggcttcaatgtcaagaatgtgtctgtcaaggatgttcgtcgtggcaacgttgctggtgacagcaaaaatgacccaccaatggaagcagctggcttcactgctcaggtgattatcctgaaccatccaggccaaataagcgccggctatgcccctgtattggattgccacacggctcacattgcatgcaagtttgctgagctgaaggaaaagattgatcgccgttctggcaaaaagctggaagatggccctaaattcttgaagtctggtgatgctgccattgttgatatggttcctggcaagcccatgtgtgttgagagcttctcagactatccacctttgggtcgctttgctgttcgtgatatga

SEQ ID NO: 1926 - DNA, 517 bp, Homo sapiens
  misc_feature 486: n = A,T,C or G
ctccatagagacagcgccggggcaagtgagagccggacgggcactgggcgactctgtgcctcgctgaggaaaaataactaaacatgggcaaaggagatcctaagaagccgagaggcaaaatgtcatcatatgcattttttgtgcaaacttgtcgggaggagcataagaagaagcacccagatgcttcagtcaacttctcagagttttctaagaagtgctcagagaggtggaagaccatgtctgctaaagagaaaggaaaatttgaagatatggcaaaagcggacaaggcccgttatgaaagagaaatgaaaacctatatccctcccaaaggggagacaaaaaagaagttcaaggatcccaatgcacccaagaggcctccttcggccttcttcctcttctgctctgagtatcgcccaaaaatcaaaggagaacatcctggcctgtccattggtgatgttgcgaagaaactgggagagatgtggaatnacactgctgcagatgacaagcagccttatga

SEQ ID NO: 1927 - DNA, 142 bp, Homo sapiens
actatatacatttagtatatcgccccctacaggaagtctaaaatacattttagaaaattttataatcaaaaaaaaggatgaatgatttattttatttatctgacaaaaattcagccctaggctattgacagctgcagttctc

SEQ ID NO: 1928 - DNA, 455 bp, Homo sapiens
acaaacccaaaggaagtgaaccttgaacttcagctccaacatgaagctctcagggcagcccgtgttctatcccccagagtctaatgctcattactggtaactgctgccaccaccatgaaagagtggccaccacatctttattgcatactcaggtgaataacttattatacaatgaacactcctccattaggagaccatgcccacttacagaatgcagccgtaaatgcggtaaatctatttacagaggttggggtgcaagatgagagaagtatcagccccaggaatttgaagtgagaatgatctacaaattctcctgacaaggagcaaccgggcttgtgctagtgaggtctgaaagaattcctggcagagcgtagggggagattagatctcggaattgacagcaagtttggggacagtgcaagaagagaggggtgacctgtgaatttggtgctggg

SEQ ID NO: 1929 - DNA, 504 bp, Homo sapiens
  misc_feature 493: n = A,T,C or G
acttattcgaatgatatacttgtgagctgttccatggtcataatcatccccaggagctgtccaagtcagattaatgagactgcccccgtgaatttccgccttcaggtcggtgatttggccaggtgggaagagatcaggtatgggagcatttgggacatcagaagccacaaatgagcctcccgaggatgttctgctgaaacacacttgcttgtgttgaacatcatccttattaatttcaggtcttggtggattccattgtatttcatcattctcaatccagccaggtatgtacctgcccgggcggccgcccgggcaggtactgggattacaggtgtgagccaccatgacatttcaataaatgctctaataaactgttttcagttagctctctaaatatatatttgtatgttgtctatagagtagtttaaaagcaatacagcaaaaaattgggttctttatatgctgagccatattgacacagatgtccctctgntggtacttgtt

SEQ ID NO: 1930 - DNA, 319 bp, Homo sapiens
ctttgctgagattggctcctttgcttcttggaaatccacagccaatggtgatgtgaccgtgtctggcggtgaacctaccctgaaacgtgacttctgcacaacaaacgtgaccaaacatcaaagctaaagcaatgtttataaagttttatggtataactagggggaaatgagctgcacaaacctcaatgtattttaaatctgttgctgtcatcattaacggtatatgacatataaaagcaagttaaaatttacttttgtaaataaagtttttggtttgtttccgaaaaaaaaaaaaaaaaaaaaaaaaaaaaaagcttgt

SEQ ID NO: 1931 - DNA, 149 bp, Homo sapiens
gggtttacgacctcgatgttggatcaggacatcccgatggtgcagccgctattaaaggttcgtttgttcaacgattaaagtcctacgtgatctgagttcagaccggagtaatccaggtcggtttctatctacttcaaattcctccctgt

SEQ ID NO: 1932 - DNA, 557 bp, Homo sapiens
  misc_feature 224, 494: n = A,T,C or G
atcacttcttaattatatgttcatactctaagtatcaaaatcttccaattatcatgctcacctgaaagaggtatgctctcttaggaatacagtttctagcattaaacaaataaacaaggggagaaaataaaactcaaggagtgaaaatcaggaggtgtaataaaatgttcctcgcattcccccccgcttttttttttttttttgactttgccttggagagccanagcttccgcattttctttactattctttttaaaaaaagtttcactgtgtagagaacatatatgcataaacataggtcaattatatgtctccattagaaaaataataattggaaaacatgttctagaactagttacaaaaataatttaaggtgaaatctctaatatttataaaagtagcaaaataaatgcataattaaaatatatttggacataacagacttggaagcagatgatacagacttctttttttcataatcaggttagtgtaanaaattgccatttgaaacaatccattttgtaactgaaccttatgaaatatatgtatttcatggt

SEQ ID NO: 1933 - DNA, 515 bp, Homo sapiens
ctcttccacccctgccaggcccagcagccaccacagcgcctgcttcctcggccctgaaatcatgcccctaggtctcctgtggctgggcctagccctgttgggggctctgcatgcccaggcccaggactccacctcagacctgatcccagccccacctctgagcaaggtccctctgcagcagaacttccaggacaaccaattccaggggaagtggtatgtggtaggcctggcagggaatgcaattctcagagaagacaaagacccgcaaaagatgtatgccaccatctatgagctgaaagaagacaagagctacaatgtcacctccgtcctgtttaggaaaaagaagtgtgactactggatcaggacttttgttccaggttgccagcccggcgagttcacgctgggcaacattaagagttaccctggattaacgagttacctcgtccgagtggtgagcaccaactacaaccagcatgctatggtgttcttcaagaaagtttctcaaaacagggagt

SEQ ID NO: 1934 - DNA, 418 bp, Homo sapiens
acttgtttcaccatacttcattcagaccagtgaaagagtagtgcatttaattggagtatctaaagccagtggcagtgtatgctcatacttggacagttagggaagggtttgccaagttttaagagaagatgtgatttattttgaaatttgtttctgttttgtttttaaatcaaactgtaaaacttaaaactgaaaaattttattggtaggatttatatctaagtttggttagccttagtttctcagacttgttgtctattatctgtaggtggaagaaatttaggaagcgaaatattacagtagtgcattggtgggtctcaatccttaacatatttgcacaattttatagcacaaactttaaattcaagctgctttggacaactgacaatatgattttaaatttgaagatgggatgtgt

SEQ ID NO: 1935 - DNA, 184 bp, Homo sapiens
actgtttgcattaataaattaaagctccatagggtcttctcgtcttgctgtgttatgcccgcctcttcacgggcaggtcaatttcactggttaaaagtaagagacagctgaaccctcgtggagccattcatacaggtccctaattaaggaacaagtgattatgctacctttgcacggttagggt

SEQ ID NO: 1936 - DNA, 483 bp, Homo sapiens
  misc_feature 34, 36, 85, 135, 242, 257, 281, 294, 380, 401, 413, 433: n = A,T,C or G
tttttttttttttttttttttttttttttatttnanaggcaaagaataattttttattatcaaaaaggtttctgcacattgttgnggcaatattgtatctgtttaaaaaatgggcttttccaaaagcaaacaaanataggttcctcaggtgaccaaaactgaaaatcaatatttccatgtttcattaatcaaggcataaaatacaattaaagcaaaatattttacattaaaatcttggttgngtatttttttaaaanaagggaaatagtttagtttggggnggaaattaccagngatttctatttttattaaaccattcactacaacaaataagtataaaaattccaattccacttttatacctatttatttgttgtagngaatggttcaataaatggcanatttatgtccanaagtcactctattttgtcgngtattaggggaacacattttgacatttttcgtaccaatcatcaatcatat

SEQ ID NO: 1937 - DNA, 497 bp, Homo sapiens
ggcctggatcaccctgctcatgcttcctgactttgaccgcaggtgggatgacaccatcctcagctccgccttggctgccaatggctgggtgttcctgttggcttatgttagtcccgagttttggctgctcacaaagcaacgaaaccccatggattatcctgttgaggatgctttctgtaaacctcaactcgtgaagaagagctatggtgtggagaacagagcctactctcaagaggaaatcactcaaggttttgaagagacaggggacacgctctatgccccctattccacacattttcagctgcagaaccagcctccccaaaaggaattctccatcccacgggcccacgcttggccgagcccttacaaagactatgaagtaaagaaagagggcagctaactctgtcctgaagagtgggacaaatgcagccgggcggcagatctagcgggagctcaaagggatgtgggcgaaatcttgagtcttctgagaaaactgt

SEQ ID NO: 1938 - DNA, 453 bp, Homo sapiens
gaaattacatgagtccagctaccctcatttcttttttatgtgacatggagcacaaagaactgaaaatatgttttgagggagcatgacatccttgacctcatttgaaattacttccattttcaaaaaccatcatgttttgtagatacattttgagaaaaaccatcatgttttgaggatacatttgtgaaagtgcaggcatgccaatgactactcagttttaggactttctgtggaagaaaaaagggagaagaaatcaattccactacttttgaagttctgcaacagatgagattttgtttgtaaagttttgtagtatattaaccattggtttatcactctagattcaacatattaaaatgtattcaagctcacagatttttaatcagtaaggcctatctatattagttgtcttttatttcttctccttgtggacagttgttaatgaaaggagta

SEQ ID NO: 1939 - DNA, 347 bp, Homo sapiens
accgatttattcccatgctagggaggactttgattcactctacacaagagccaaccattcagagggacaacttcttgttcaaactatacagatgatgtttaaagtgttaattaccatttttacaagaatccttgctgctttcatggaaaggaagtatctgatggccggaaccagcggctgtccacagtttgtgactgacattcgaaggctgagaagggtccaccttgaggtctacttgatgttcactagtcctcaccaagtcagaatgagattgagttgtagggtaagtggcatcctgatggataactgatggattcagtttgttgaaagtgttaaatgacatgtgt

SEQ ID NO: 1940 - DNA, 419 bp, Homo sapiens
accacatgggctgaaatggtaaaggagtgctccctaatggaaaatgagactgttactaccaaaggaaggaggaataaatgctgggaaggcaaaaacaacagcagatgtctattgcagtatggagttggaaaggccatctgtgcttttgtgtcccagaaattcaactacaaaataaagagctgatcctctttccagatgcacttactttatagcagcaaagtcaaaataattaaaatagtaaaaggttattcccttccccatgtattttatacccttcctatatattaaggtattctgtaagtatttaatgatttaaactaagcttgtattctttgccttggtcatgaaacgattagaataaaccccccccaaatagctcattgtctgtctagtctccaattatctctgtagagaaaagt

SEQ ID NO: 1941 - DNA, 481 bp, Homo sapiens
acaagatgattcttcctcctcaatttgacagatcaaagaagtatcccttgctaattcaagtgtatggtggtccctgcagtcagagtgtaaggtctgtatttgctgttaattggatatcttatcttgcaagtaaggaagggatggtcattgccttggtggatggtcgaggaacagctttccaaggtgacaaactcctctatgcagtgtatcgaaagctgggtgtttatgaagttgaagaccagattacagctgtcagaaaattcatagaaatgggtttcattgatgaaaaaagaatagccatatggggctggtcctatggaggatacgtttcatcactggcccttgcatctggaactggtcttttcaaatgtggtatagcagtggctccagtctccagctgggaatattacgcgtctgtctacacagagagattcatgggtctcccaacaaaggatgataatcttgagcactataagaattc

SEQ ID NO: 1942 - DNA, 432 bp, Homo sapiens
actgtgcttgaagcagagcactcacacataaatggctgtgtgtggaattgcttgccaaagaagtttctagcctttccctttcccctaactgcatcagggtagaattcttatctctagcttggtttccacatgaggtttttctgagaagggcttgggacaagaagtctgtcatgttagttaagcaggcaagaaatcctactaatccagttttgtttgaaagttgtttgtccgtatgattttttaaaagtcaagtttaatttcaaaaaaccttttttttctgagattacttttggggtaatatttaaaatgagagacattttgtaaccctgtaaaatacatagggaatataacattccagtgtatacaaagaaggcaaattctttaatcaaataaagcgcattataaaatgaaaaaaaaaaaaaaaaaaaaaag

SEQ ID NO: 1943 - DNA, 275 bp, Homo sapiens
tgttattgtggttgtggtgatagcagttgttgctggaattgttgtgctggttatttccagaaagaagagaatggcaaagtatgagaaggctgagataaaggagatgggtgagatgcatagggaactcaatgcataactatataatttgaagattatagaagaagggaaatagcaaatggacacaaattacaaatgtgtgtgcgtgggacgaagacatctttgaaggtcatgagtttgttagtttaacatcatatatttgtaatagtgaaacctgt

SEQ ID NO: 1944 - DNA, 484 bp, Homo sapiens
accttgaagtcaaattgtctgtttttgttttgttgttgttgttgttgttttcttaagtgttacattaaaactctaaccaaggaaagggttctttaagaacattcccttagagggataaagttgagaagtgtgccttttttttaatggcttgaagtttcagaggtgataaaaattaaaatcacactactatttgaagctcattttctatgcaggtttttaaacgtcatttatgtatcattctttttatatatcacacttaagcttgtgttagcttttttcttttgccccagatcaaactgaacaatgtatataacactatctgtctgtaaaatactttttttaagaaagcatttatatttatatgacagcttgaactgacaacattgtgtatatagatcatcttgaagtattatttcacattgaaaagaagaaaatatattgataactatagatgttatgaagaagagggtatttctagttttgt

SEQ ID NO: 1945 - DNA, 513 bp, Homo sapiens
  misc_feature 81: n = A,T,C or G
acctcttccaagccaaagacgatgaggaaatgaacacatggatccaggctatctcttccgccatctcctctgataaacacngaggtgtctgccagcacccagagcacgccagcatccagccgcgcgcagaccctccccaccagcgtcgtcaccatcaccagcgagtccagtcccggcaagcgggaaaaggacaaagagaaagacaaagagaagcggttcagcctttttggcaaaaagaaatgaactcctttccttcacctcctgcccttctcttaccttttcagtgaaattccagcatgcaagctcagaaccaacacattactctctgtgcctaatgttcctcaatgtggttgattttttttttttttaatttatagagcatttcggggggggtgggggaaacacacctaaacactttatctccaagttacaaaagtttgaggtgcagagggaaggccagatttttttttaatgaaattatatagattagatctcagtatttaaactgttcct

SEQ ID NO: 1946 - DNA, 205 bp, Homo sapiens; identical to SEQ ID NO: 1553

SEQ ID NO: 1947 - DNA, 572 bp, Homo sapiens
actatatcacagccaagagagattagagagagaaaatgtagatcaaggcgagctgcctacaaattactctgtctccaaaggcaacgtgaaaagaaatgatggggaggaaaaaaccccatagattgaattagcactttgactctcacttaattcaacgattttctttcctagattggcttttcttactcttttctgttagtagatttatttataaacaccacaagaagatctcttgggatcagaattatataatatctttgaagtaaattattaaaatatcctatttaatttgaatagtgaagttttgaaaatactttgaaaaagagaagtaaaagtttaactttttaactaaagttagtatttgtttttcagaaatgaccactgaagattcattctgattatacaatatggtttttatgcataaaatttccatgtaacttgaatttaatatttttaaacagaatattttgactaatcctctattttttcatgactattcagttgtgtgtgtttattcgtaaatgttatgttttgtaattggatcacatatttctactttcagtgagagtatg

SEQ ID NO: 1948 - DNA, 367 bp, Homo sapiens
acccaagttcctgttcttaaccactacactctagcagcctctaagtttagccctgcaaccaaagagttcctccagggaaggaacgcttcaggtcatggagaagttcaaggggaaaatatccaaatggctctgtctccaaatggggagatcctaagggccagagaaggtgatgccaaggggagcctccactacagagagccaggcaggaccaaggacacccagggcaaatgattgtgttccaccggcagcttactaccagcccagtctgactgcggagtatgatgaagacagcccaggaggggactttgactttttctccaacctcgtaaccaaatgggaagctgcagccaggcttcctggagattct

SEQ ID NO: 1949 - DNA, 558 bp, Homo sapiens
  misc_feature 113, 282, 358, 402, 415: n = A,T,C or G
acaagctttttttttttttttttttttttttttttgggtaaattgtaatttttttattggaaaacaaatatacaacttggaatggattttgaggcaaattgtgccataagcanattttaagtggctaaacaaagtttaaaaagcaagtaacaataaaagaaaatgtttctggtacaggaccagcagtacaaaaaaatagtgtacgagtacctggataatacacccgttttgcaatagtgcaacttttaagtacatattgttgactgtccatagtccacgcanagttacaactccacacttcaacaacaacatgctgacagttcctaaagaaaactactttaaaaaaggcataacccanatgttccctcatttgaccaactccatctaagtttaaatgtgcanaagggcttaaatntatccagagtaagccacatgcaacatgttacttgatcaattttctaaaataaggttttaggacaatgacagtaagataagggaagaaaacatggaggaatgaagtcctaattactatacatgcatatttttttgacagtaggg

SEQ ID NO: 1950 - DNA, 372 bp, Homo sapiens
accatttctctgttgtatgttggattatgtaggaaatgtttgtgtaccctgcttctgctggcttaatgcctcagaactttggtgtcattggtctcagacaccactttgccatccaccatccggcgggtggtggtcttttggatggtttgcatggagttgctgctgtccaaggcatcaccaagattaaagtcctcgccatcttccagcaggcggcggtaggtggcgatctcagcctccagcttgaccttgatgttcagcagggcctcatactcctggacctggcgctgtccctctgcccgggtctgtgccagctctgactcaaggtgcagcaggatcccgttgagctgctccatctgtagggcgtagcgggcc

SEQ ID NO: 1951 - DNA, 410 bp, Homo sapiens
acacacaaatatacatacacaagaattctgcccacttttttaaaaaagtagtatactttctgtattaccaacagatagctagacagatatgtgaaacttgtgccttttaagcaaatacattaacattgggggttttttaatacttctgtatctttaatatgtgtgaaaatgttacatattaaatacagccggtgtgtgatctatacaattgttgtgcaaggtctatatgaaagtctcaaggtggcagaattggtcagatttttccattttcctgttttccattttaacactgacagtcaagttgcctaaagtgttgaacaaatactgacatgtaaagggagtttcactctatgtctttgtgaaggaggaccttaaagagattttttttctgtattatacgttgatacagt

SEQ ID NO: 1952 - DNA, 357 bp, Homo sapiens
gtggaggtgtgggctgaaggtagtgactgtttgattttaaaaagtgtgactgtcagttgtatctgttgcttttctcaatgattcagggatacaaatgggcttctctcattcattaaaagaaaacgcgacatctttctaagattctctgtgggaaaatgactgtcaataaaatgcgggtttctgggccattcgtcttactttcattttttgattacaaatttctcttgacacacacaattatgtctgctaatcctcttcttcctagagagagaaactgtgctccttcagtgttgctgccataaaggggtttggggaatcgattgtaaaagtcccaggttctaaattaactaaatgtgt

SEQ ID NO: 1953 - DNA, 543 bp, Homo sapiens
acacagcacattctcttaagagaaaacaggaatgaacattctcagaaacattcacattgctcatcaaatgtagctttacccaaagtatataggaaatggcaaaaacctaacctagctggacattttatacaagtaagtcaaagttcaaaggaatcatcctatctttattctcagaaatccaatgttgaatatcacagttcttctttaatggaagcagaagattcagagtccttgtctcccaaaatgcctcagccagggtcagcacagagagtggaatataaaaagcttaattgtgttaatacatggaggacaacagttctcagtcaacctagccacaattttctgtcttggccatctgtaagaaatgactacgtttgaaattcaactttcacattcaaaaaaaagaaatcaattcagcttcagacacaaagcaaaaccaaaacaaaaaaacaaatggcaatagtctacatatctaaacacttgacaattggggaactgtcccacagtgatatgctcaaggccagtagcacctatttataattt

SEQ ID NO: 1954 - DNA, 528 bp, Homo sapiens
gccagaactaccaccaggactcagaggccgccatcaaccgccagatcaacctggagctctacgcctcctacgtttacctgtccatgtcttactactttgaccgcgatgatgtggctttgaagaactttgccaaatactttcttcaccaatctcatgaggagagggaacatgctgagaaactgatgaagctgcagaaccaacgaggtggccgaatcttccttcaggatatcaagaaaccagactgtgatgactgggagagcgggctgaatgcaatggagtgtgcattacatttggaaaaaaatgtgaatcagtcactactggaactgcacaaactggccactgacaaaaatgacccccatttgtgtgacttcattgagacacattacctgaatgagcaggtgaaagccatcgaagaattgggtgaccacgtgaccaacttgcgcaagatgggagcgcccgaatctggcttggcggaatatctctttgacaagcacaccctgggagacagtgataatgaaagctaagcct

SEQ ID NO: 1955 - DNA, 530 bp, Homo sapiens
acttgtctagctcctctcggttcttccgagccagctcgtcatattgggcccggatgtctgccatgatcttggcgaggtcctgagatttgggggcatctacctccacggtcaacccagagctggcaatctgggcttgtaggccttttacttcctaaaggtgacaggggcaaaagtgaggagggttcagggtcagagctccaacaaggcctttcttctgtgattgcctcttctaggaggcctacagttggagaagagacaggaggaaccccttggcttgcactcagggcaatgccagttctggcctttctactccagtgggtagaaatgccacccactcactgatggtttctctgtaacttcaccccgttcctttatccaccctccccttcacaaacctgctccttctaccatcttttaggaagcgctgccaactccatctgctgtcattcctttatcacccccagctcctagtgttagctgcttctacttctgttctcatctcattttctaacccatatcattttgacctg

SEQ ID NO: 1956 - DNA, 380 bp, Homo sapiens
  misc_feature 363, 370: n = A,T,C or G
accatcacaacttttcacaacgatggcaagccttatgtcttgggagcctgttttgctaggcaaagttacaagtgacctaatgggagctcaaatgtgtgtgtgtctctctgtgtgtttgtgtgtgtgtgcactcaagacctctaacagcctcgaagcctggggtggcatcccggccttgccattagcatgcctcatgcatcatcagatgacaaggacaaccctcatgacgaagcagcatgaattagggggcctcttggccttggtccaaaattgtcaatcagaaatgaacataaaggactccagagcagtgggactgtctgtcaaaagactctgtatatcttttgtggatgagttttgtgaganaacaganagaccattgt

SEQ ID NO: 1957 - DNA, 389 bp, Homo sapiens
gcatgacaaggtgcggctccctaggcccctcccctcttcaaggggtctacatggcaactgtgaggaggggagattcagtgtggtgggggactgagtgtggcagggactccccagcagtgagggtctctctcttcctcttgtgctcttgctggggctggtggtccaggggtcttactccttggaggccatgtgggccatgaggtccaccaccctgttgctgtagccaaattcgttgtcataccaggaaatgagcttgacaaagtggtcgttgagggcaatgccagccccagcgtcaaaggtggaggagtgggtgtcgctgttgaagtcagaggagaccacctggtgctcagtgtagcccaggatgcccttgagggggccctccgacgcct

SEQ ID NO: 1958 - DNA, 462 bp, Homo sapiens
agcgcctcggctccagcgccatggcgccctccaggaagctcttcgttgggggaaactggaagatgaacgggcggaagcagagtctgggggagctcatcggcactctgaacgcggccaaggtgccggccgacaccgaggtggtttgtgctccccctactgcctatatcgacttcgcccggcagaagctagatcccaagattgctgcggctgcgcagaactgctacaaagtgactaatggggcttttactggggagatcagccctggcatgatcaaagactgcggagccacgtgggtggtcctggggcactcagagagaaggcatgtctttggggagtcagatgagctgattgggcagaaagtggcccatgctctggcagagggactcggagtaatcgcctgcattggggagaagctagatgaaagggaagctggcatcactgagaaggttgttttcgagcaga

SEQ ID NO: 1959 - DNA, 386 bp, Homo sapiens
acggccagggctattggttgaatgagtaggctgatggtttcgataataactagtatggggataaggggtgtaggtgtgccttgtggtaagaagtgggctagggcatttttaatcttagagcgaaagcctataatcactgcgcccgctcataaggggatggccatggctaggtttatagatagttgggtggttggtgtaaatgagtgaggcaggagtccgaggaggttagttgtggcaataaaaatgattaaggatactagtataagagatcaggttcgtcctttagtgttgtgtatggttatcatttgttttgaggttagtttgattagtcattgttgggtggtgattagtcggttgttgatgagatatttggaggtggggatcaa

SEQ ID NO: 1960 - DNA, 274 bp, Homo sapiens
acgagttgcctttagcttaaatgtctttaaggaagaagaagaagaagaaaaaacaaaacaaaataaaaaaacaaaaaaacacaaatgtccaaagggaattctggttggtcctctctttcttcggttatttttaggatcatctcggccatcgtcgcccttcgtggggggcctcctcaaggtcgagtgagctgtgtgtagacgggttgttcccagtgctgggggctgtgggtctgcgggatggaagggaccccagaggtgtcggcgatgggggtgt

SEQ ID NO: 1961 - DNA, 404 bp, Homo sapiens
  misc_feature 401: n = A,T,C or G
acggatgctacttgtccaatgatggtaaaagggtagcttactggttgtcctccgattcaggttagaatgaggaggtctgcggctaggagtcaataaagtgattggcttagtgggcgaaatattatgctttgttgtttggatatatggaggatggggattattgctaggatgaggatggatagtaatagggcaaggacgcctcctagtttgttagggacggatcggagaattgtgtaggcgaataggaaatatcattcgggcttgatgtggggaggggtgtttaaggggttggctagggtataattgtctgggtcgcctaggaggtctggtgagaatagtgttaatgtcattaaggagagaaggaagagaagtaagccgagggcgtctttgattgtgtagtnagg

SEQ ID NO: 1962 - DNA, 427 bp, Homo sapiens
actattgacccagcgatgggggcttcgacatgggctttagggagtcataagtggagtccgtaaagaggtatctttactataaaagctattgtgtaagctagtcatattaagttgttggctcaggagtttgatagttcttgggcagtgagagtgagtagtagaatgtttagtgagcctagggtgttgtgagtgtaaattagtgcgatgagtaggggaagggagcctactagggtgtagaataggaagtatgtgcctgcgttcaggcgttctggctggttgcctcatcgggtgatgatagccaaggtggggataagtgtggtttcgaagaagatataaaatatgattagttctgtggctgtgaatgttataattaaggagatttgtagggagattagtatagagaggtagagtttttttcgtgatagtg

SEQ ID NO: 1963 - DNA, 506 bp, Homo sapiens
acattagaaaactacttgtgacattatttctaagtgcaggagagcagctcctggtgggagagtaatgaagttgtttgtcatagtgtatgccaaggatttacagcactctagaattttcacaactcttccatgttagtgaatgacattaggtaaatgttgtatttgcctactctcagctatcagatgtgggatttcaaactagaaacaaataaagcatacactcaaccaacaagggtagtgcaagtgctaagtaaacagaatgacatggaataaattcatagttgccaactagtgaatgcttcagcagggagaccctgattttatgatgtctgtgacttgcatccctgttctcaaatgaatactgtcactgctccatgtcagctacaatgaccggaaaaggctgctggggtgagggctgagtgaatgaggaagatgacaggaactcattttcacaaacaagtggttcaatttatctgtcacatctgtatatagtgtaaagtctgatt

SEQ ID NO: 1964 - DNA, 170 bp, Homo sapiens
  misc_feature 78, 112: n = A,T,C or G
gtacaagctttttttttttttttttttttttttttttttaataatttatcttttattgaaattgttgaatactttatnttacagtaaagttgattgaaaaaaaaatgaaganaaaaatcaattttaaaaaatacactcatgttgaaatcaaacaagccagccaaaccggt

SEQ ID NO: 1965 - DNA, 530 bp, Homo sapiens
  misc_feature 501: n = A,T,C or G
acaggtcagagtcttcttttcttttctttttgagatggagtcttgctctgttgccagactggagtgcagtggtgcgatctgggctcactgcaatctccacctcccgggttcaagcgattctcctgcctcagcctcccgagtaactgggactacaggtgcgcgccaccaagcccagctcatttttgtatttttagtagagatggggtttcacgatgttggctaggatggtctcgatctctggtcagagtcttttctgtaaatatccttggtaaagaagcaattttagactgtagctgttgcaaatgctttaaggaagaagcaaaacaactgtcagtcttcctgaaatgaagaaactacaccagggctgctatatcagagcaaccccaaccagcactccaatcatgatgccgacagtggccccagctgagagaccaggagaagttccagatgcagagactgtgatgctcttgactatggaattattgcggccagtagccaagntagagacaaaacaggcataggtcccgtta

SEQ ID NO: 1966 - DNA, 355 bp, Homo sapiens
accattacctcttcaactcagccagtggcttggcagtttcccttgtgcagtgtttaaaactgggccacagttttgaatgcagttgtggatattaaaatgaaatagattaggaaagaatagattaagatagaatacagataagaaaataagaaaatatcagccttcatctggcaaagaaaataccagccttcatctggcaaagggcatcatcaggcatcaccaggaggtgctctgtatccataggttccctatctgtgggttccaccaccactgataaaaaatatttggaaaaaaatacaacaatgcaaaataatacaaatttaaaaaaatacaatatatttatgtggtgtttaca

SEQ ID NO: 1967 - DNA, 451 bp, Homo sapiens
acgtggactcagagcacagagaaaagaaactaaaatgccttttggcatttcaagatatttggcactcttgtgattacatttttttacagtccattaaagagaataaactgacataatattagagaaataaacaggctgctcacacaacagactgcaaggggaagttagaaaaagctcaagcatttttttctttgtttttcgtgtgtgtgtgtgtgtgtgtgtgtgtgtgtgtttttctgacataaaaaatgtgtccatttgcattaacttgggcagatagcttgcagcaacaaagaaacacaagctttacaactcattttaaaataaaatcttttctatgtatcattccttagaaaagttctcttcttgttttaaacacattcctgataacttctaaagatgaccaaaataaaacagaatatctacagagatcattttctgaattttttgt

SEQ ID NO: 1968 - DNA, 415 bp, Homo sapiens
acaatttaatttttctgcttgcccaagaaacaaagcttctgtggaaccatggaagaagatgaaaatgagactggcaaagaacaaatgctgaatctgaagaagaggacaactttgggcaaataatctgcatacttttaattgggaataagatggaaaatatgaatgctaaatcaaattttttaaaaaatacaccacacgatacaactcaatacaggagtatttcttctcaaattcttctagcaccatcaacattcttcaagtatctgaaatactattaattagcacctttgtattatgaacaaaacaaaacaaggacctcagttcatctctgtctaggtcagcacctaacaatgtggatcacactcatgggaaagtgttttgaggtagtttaaacctttggaagtttgggttttaa

SEQ ID NO: 1969 - DNA, 379 bp, Homo sapiens
accagtgaacctgacagattagtttgggactggagttctaatgttgatatgaatcaactttattccttatatagctggcaccaggtggtcaaaaggctgactataaaatacagatgcaggaggattgttaaaatagacataagtgcactgtgcaaaatacatctgtttacttaaatctatgagaaaattaaatgaagggttcaaacagaaattaacaattagtgaaaacagatgtagtgctttaaaaaaaaacaaaaacaaaaaactacagatataacacatttttacccggaactttgaaaggtaaaaagcgattgctatacaacatcataaaacattccagtttgttctgtcttcctttataacaaaaacaaaaagt

SEQ ID NO: 1970 - DNA, 338 bp, Homo sapiens
caatgctaccctgcctccaattacagtgacttccaaaacgaacaaggacaccagcaaattccccagccctctggtagtttatgcaaatattcgccaaggagcctccccaattctcagggccagtgtcacagccctgattgaatcagtgaatggaaaaacagttaccttggaactactggataatggagcaggtgctgatgctactaaggatgacggtgtctactcaaggtatttcacaacttatgacacgaatggtagatacagtgtaaaagtgcgggctctgggaggagttaacgcagccagacggagagtgataccccagcagagtggagcactgt

SEQ ID NO: 1971 - DNA, 389 bp, Homo sapiens
  misc_feature 37, 146, 152, 184, 204, 209, 222, 246, 272, 297, 308, 314,354, 386: n = A,T,C or G
gtacaagcttttttttttttttttttttttttttttngaggatgaatgatttattttatttatctgacaaaaattcagccctaggctattgacagctgcagttctcctatccacttccacataatttttaaaatgtgaatgccagnaatggngctgttgatatgaatattaggacaaggagcanacgtttcatcaggactaggngtctntggcggagtctgnggaggaataaacaaagatactcgngcaatgttggatatttctgatttcanatcgaccttatcaacagcctgaatngcaatgaaaanatctgngccattttcaaaagtaatgttttctggtttaaacaaaaanacttcctcaaagttggcttcctttgggatganagc

SEQ ID NO: 1972 - DNA, 523 bp, Homo sapiens
acttcagttggtgcacaaaatactgtcatttgctcaaagctggctgccaaatgtttggtgatgaaggcagaaatgaatggctcaaaacttgggagaagagcaaaacctgaaggggccctccagaacaatgatgggctttatgatcctgactgcgatgagagcgggctctttaaggccaagcagtgcaacggcacctccacgtgctggtgtgtgaacactgctggggtcagaagaacagacaaggacactgaaataacctgctctgagcgagtgagaacctactggatcatcattgaactaaaacacaaagcaagagaaaaaccttatgatagtaaaagtttgcggactgcacttcagaaggagatcacaacgcgttatcaactggatccaaaatttatcacgagtattttgtatgagaataatgttatcactattgatctggttcaaaattcttctcaaaaaactcagaatgatgtggacatagctgatgtggcttattattttgaaaaagatgttaaaggtg

SEQ ID NO: 1973 - DNA, 379 bp, Homo sapiens
actacattttataacaatagagagtagctgaaaatactacatgctaacacagataatatgatacacaacctcaggggggaagctggcagggagcacgtggcagaggccacaggtttagactaagagcctttcaatggactgctgaatggattggatctgctgtttcagctgcgagccttctttgatggtgacagaacaggcgatgacaggcctggagaccccacaggctctccccagggcctgcttggagcgcacaaacacgtagggcacattcttgtcttcacacagcagcggcaggtgcagaatgatctccagtggctcggcgtctgcagccatcacgatgaactcagagatgcccctgttgagggttttggtggcc

SEQ ID NO: 1974 - DNA, 487 bp, Homo sapiens
cgaaaataggcagaattccattcctcccaaggtggcaaaaattagctatactgatgtaattgtcatttacctgggtatgaattccctgacacacattcatgtcaacatatgtagcaaattttgtgaaaacataacaatttgaagcttctgtaattttgagcactgctctaacaacaagcataatataaaattagttagattttgcaagtctacaaatgagctcttgcaacagaactcacagcctttttacttttttcccctaactttagcaatgtagtatcttgagccattaatttttgggtttttttaaaatccagaaggtatatagaaaccttttcagatttttcatctgatttgttcttgcagatgttcttctatcaaataccttattttaccttacagatatttgttgcacaggcagatactgctgtatttagacatttctatttcagttcattaaaaactgcaaaaccaatctgtatcatgt

SEQ ID NO: 1975 - DNA, 481 bp, Homo sapiens
  misc_feature 437, 464: n = A,T,C or G
acacagacacagggtgggggtggggaggggcggtgttaactctttctgctccttgcattttgacatccctgaaggggagctcttggatatcattggccatgtttcaatcgaatggagccactgggccccaacactggctttgagatttagagtcaaagggtagagtgaacaggaaagggtcacgtggtcccatgttgcaacagccccaacatcacgcatgtcattcactgccttgccactccatctccctccgtgctccagccacccctgagctgaggctcccattgtctccatcagagcctgcatgtgtatgccgtcctcccctggtccggtgtttgtgttccccacccctcacagactgcctgagctcttctgtaagctggggtagggtgatggcagtgctccgggaactgggcctgcagccttcctcttctggnctgctgtgaggcagaggaatgatgganaatctagtgtagcagcc

SEQ ID NO: 1976 - DNA, 128 bp, Homo sapiens
ctgacggacagatcttcttggaaacagaattgttctacaaaggtatccgccctgcaattaacgttggtctgtctgtatctcgtgtcggatccgctgcccaaaccagggctatgaagcaggtagcaggt

SEQ ID NO: 1977 - DNA, 597 bp, Homo sapiens
  misc_feature 529, 550: n = A,T,C or G
acttctctggagtaatctgttgaggatttgaggctacatcagcctagcaaaaatcacttctgtgatcagttagctagtaaaacttccacaggccacttactaagtatttgccatccttgaaccagtccaatcttaagctttttgccattttatgtttctgctgtaattttagactagttcatttttacttgagttaccaaatcttctcaagtgtttttctcttctttccctagaaaatggaatcctaatggaatttcttaaccctgaggctaacatttttgtgtttttttcttaactctctatagatctagtttcctataacactatcaatcatttaccatttctcctcatgacattggtttcaaaagtctcagcttaactttcttaattatgtcattccttcctttttctctttctttcagagccttataaataaccttgatttaggtagggatcagaattttaatgtcatttttctctacctattatcaattaaaattttgaattatatcaaagctttggacatttngtttccctctttgttatgatngtagagaaaatgtgacatagacatgatgttataggtatggtgaagag

SEQ ID NO: 1978 - DNA, 429 bp, Homo sapiens
actctgaggcttgtaggagggtaaaatagagacccagtaaaattgtaataagcagtgcttgaattatttggtttcggttgttttctattagactatggtgagctcaggtgattgatactcctgatgcgagtaatacggatgtgtttaggagtgggacttctaggggatttagcggggtgatgcctgttgggggccagtgccctcctaattggggggtaggggctaggctggagtggtaaaaggctcagaaaaatcctgcgaagaaaaaaacttctgaggtaataaataggattatcccgtatcgaaggcctttttggacaggtggtgtgtggtggccttggtatgtgctttctcgtgttacatcgcgccatcattggtatatggttagtgtgttggttagtaggcctagtatgaggagcgttatggagt

SEQ ID NO: 1979 - DNA, 446 bp, Homo sapiens
  misc_feature 382, 400, 417, 421: n = A,T,C or G
acctctgaccttctcatcaagagagctggggtgctttgaagataatccctacccctctcccccaaatgcagctgaagcattttacagtggtttgccattagggtattcattcagataatgttttcctactaggaattacaaactttaaacactttttaaatcttcaaaatatttaaaacaaatttaaagggcctgttaattcttatatttttctttactaatcattttggatttttttctttgaattattggcagggaatatacttatgtatggaagattactgctctgagtgaaataaaagttattagtgcgaggcaaacataactcatttgaggataaagtttgtgttggatatgtggttcctgatgcattttgacttgnctttttaaatgctttatntttttctttaaagattnattncaataaaactaattgggaccacccg

SEQ ID NO: 1980 - DNA, 298 bp, Homo sapiens
  misc_feature 66, 136: n = A,T,C or G
atcaaagcagtggacaagaaggctgctggagctggcaaggtcaccaagtctgcccagaaagctcanaaggctaaatgaatattatccctaatacctgccaccccactcttaatcagtggtggaagaacggtttcanaactgtttgtttcaattggccatttaagtttagtagtaaaagactggttaatgataacaatgcatcgtaaaaccttcagaaggaaaggagaatgttttgtggaccactttggttttcttttttgcgtgtggcagttttaagttattagtttttaaaatcagt

SEQ ID NO: 1981 - DNA, 491 bp, Homo sapiens
ggacactcctgggaaagcctgactcaattatgaatgcttcatggcctgtggcaggtcctgtggatgaagttttaatacactcctcacagtatcttatggaagtaacacatgaccttagactacgactcaagaactatatgatgccagctaaagggaagaagaccgacaaacaacccctgcagaagccctcacattgcaccatctatgtggcaaagaactatccaccttggcaacataccaccctgtctgttctacgtaaacactttgaggccaataacggaaaactgcctgacaacaaagtcattgctagtgaactaggcagtatgccagaactgaagaaatacatgaagaaagtcatgccatttgttgccatgattaaggaaaatctggagaagatggggcctcgtattctggatttgcaattagaatttgatgaaaaggctgtgcttatggagaatatagtctatctgactaattcgcttgagctagaa

SEQ ID NO: 1982 - DNA, 90 bp, Homo sapiens
actcacaaacactgccattttcttagagatggcttgagaggagtaacactatggtttaaagcttgcagtaaaaatgccaaacactgtagt

SEQ ID NO: 1983 - DNA, 624 bp, Homo sapiens
cagcaaagggtttggttttgtatgtttctcctccccagaagaagccactaaagcagttacagaaatgaacggtagaattgtggccacaaagccattgtatgtagctttagctcagcgcaaagaagagcgccaggctcacctcactaaccagtatatgcagagaatggcaagtgtacgagctgttcccaaccctgtaatcaacccctaccagccagcacctccttcaggttacttcatggcagctatcccacagactcagaaccgtgctgcatactatcctcctagccaaattgctcaactaagaccaagtcctcgctggactgctcagggtgccagacctcatccattccaaaatatgcccggtgctatccgcccagctgctcctagaccaccatttagtactatgagaccagcttcttcacaggttccacgagtcatgtcaacacagcgtgttgctaacacatcaacacagacaatgggtccacgtcctgcagctgcagccgctgcagctactcctgctgtccgcaccgttccacagtataaatatgctgcaggagttcgcaatcctcagcaacatcttaatgcacagccacaagttacaatgcaacagcctgctgttcatgt

SEQ ID NO: 1984 - DNA, 90 bp, Homo sapiens
tttttttttttttttagaggaaaaccctggtaatgatgtcggggttgagggataggaggagaatgggggataggtgtatgaacatgaggg

SEQ ID NO: 1985 - DNA, 497 bp, Homo sapiens
  misc_feature 358: n = A,T,C or G
acttaagcatttccacttttggaagaaaagtgtattagtattttatattgcatttcatttaaaaggacagtttttttttttttgtaaatccattcattgaaatggtttctaaactgtataatgtaatttggagcctatttagtaatagaattaaatgtcctatgtagtgctacaatttttgaattagaaagtgatcaaatgtaagaaaaaaatttaaaaattcagcccagaaaacaaaatagtgtattaaattagtttaatgtaaaaggaatttataagatttttttcctcaatatagatacctcacttgaaaagaaagcacagcatacttaaagtagttctagtaaacatgtcctanaaaacagttgctaaatgtaggacatcttttgaggaattagtttatgagaaataaaattttacttgtttttactatcctgttagaagtatttgtttatcctgataattttaagccaacatagtagtcttaaattactttt

SEQ ID NO: 1986 - DNA, 342 bp, Homo sapiens
acctggagcggagggtcaggcacaggtaggaacggggctcacaggccgagcagagccccctctggcccctactcaattccttcctgcttgtcttttatggccacccgaaagcgctcctccagcagggacagctcactgatgaggtcggtgacggcgttggtaaaggcttcctgggggctgtagtccggcgtggtctgcactcggatgatgatcttgtgctccaaggggtgggggactttgtagccagcaaatagcacttgcgggtcttttaggagttgtgatttaatgatgtttcccagtgtgtggtcttctttgttgatggtgaataaacaggcattgggt

SEQ ID NO: 1987 - DNA, 475 bp, Homo sapiens
acagtatgtgagaaaggaaattggaaaataataagggttgtggtaataagagtcatttatctaggcctagactgggactgaagctatctgcttctatgatcagaggcctagctttcctagcaaccatgagctagaattctgtccaactcaggtagcaccagaagtgagatggactaggttgtagagaaggcctttcgcttgacaagacagttaatgctaaatgttaatatttagcacttaaaagtttgggatcagtgtgagtcacaactgtagagttaatgaaggggatggacttaaattaagaaactacaggttttcagaaacatatcttgtgggttggcaatgagcttaataattacagattcatattcctggtttgatcccaaaagctaatgtgttcctcatcgtgcagctggaatctacttcctagattaagccggagccttcctgcagagacagtgggcaaacctcaccc

SEQ ID NO: 1988 - DNA, 502 bp, Homo sapiens
cagcattttgctgctaccttacaagcttctcttctgtcaggactccagaggctggaaagggaccgggactggaaagggaccaggactgaacagactggttacaaagactccaaacaatttcatgccctgtgctgttacagaggaggacaaaatgctttcagcaaggatttgaaaactcttccgtccctgcaggaaaggattgatgctgatagaagagcctggacagatgtaatgagaactaaagaaaacagatggctggagatgacatttatccagggtcactttgtcaggccctaggacttaaatcgaagttgaactttttttttttttttaaccaaatagataggggaagggaggagggagagggaggacagggagagaaaataccatgcataaattgtttactgaatttttatatctgagtgttcaaaatatttccaagcctgagtattgtctattggtatagatttttagaaatcaataattgattatttatttgcac

SEQ ID NO: 1989 - DNA, 463 bp, Homo sapiens
acgctgcttcttcagagcaatacgccgccgtttgtgctgcaggacacgtggagtaacaagacgctgaatcttgggtgctttggtcctaggtttcttacctaaaaattcaaaggactcaatcatttcaatatttgttttgttagaatccacatctactttaaaaacatcagaaataaacgtaagcttaacagcatctatgaaaacctataatgaggcctttaaaatcaaatcagaactattctaaaatgctttttgcccctccacagaaatctagaagattggttaaatattataaaaatataagggaaaccaagtcctgaaaaataaccaggctaacttttactaccttccagttttactaaaatacagtggcattatgttaatatataactgtgcatagttaatttgtctgtggaaaccacttaacacattatctacataatcatcctgccatacttttaaa

SEQ ID NO: 1990 - DNA, 478 bp, Homo sapiens
actcattggtgaccaaaatctggtgacaccatcttttatgttctttgccatattcttaaatgcctggcaaacagtagatatttaccagatgaatatgacattaaaaaaataaatttcaagagattgagattctttagccaagttgagggactacatcattttgaagcactctagaagggggatgtgattaaatgtgactgcatgcctgggctggctgcttctaggtataaagctgtgttaaggcgtgggaataggagagcaatgccctagggaaaagagggcactaggggaaacaatggttgcagtgcactgcagaatgaccaatggcacctacttccagagttttccttcaactaaaaagagatggcattttcttatgattcagtaaccgcattacttacatcaacattatggttgctatagacaagcctaggtagctagcctctatttacatcatcccactaagggtatccaaacc

SEQ ID NO: 1991 - DNA, 542 bp, Homo sapiens
  misc_feature 539: n = A,T,C or G
cttaggcgcttagttgatgtatccaagatacttctgcttgctgtggccctggatccgtgaaggccttcaaggctgaagggtatgcttgtgccactctgaaaatctctttattttatgtcatggtgagttaggccagttttctttgtattactggattattcaactgaatgcctttcccagagaatgaaatgcaaagattggagtcaccatagtttgggagaaaggaaggctgataactcaaccttattttattctgactgctaaacagaattggaaactaacatcatcctcaggtaacagataaaggccctctttcccattcataggaagcaattttggaggtggtggaagctacaatgattttgggaattacaacaatcagtcttcaaattttggacccgtgaagggagaaattttggaggcagaagctctggcccctatggcggtggaggccaatactttgcaaaaccacgaaaccaaggtatggtatctatgtaattttggataatgtcaaaagagtgtctgtagctactgctggnaga

SEQ ID NO: 1992 - DNA, 182 bp, Homo sapiens
  misc_feature 149, 167, 169, 170, 171, 172: n = A,T,C or G
actgcggcgggtaggcctaggattgtgggggcaatgaatgaagcgaacagattttcgttcattttggttctcaaggtttgttataattttttatttttatgggctttggtgagggaggtaggtggtagtttgtgtttaatatttttagntgggtgatgaggaatagngnnnngagtgtgggg

SEQ ID NO: 1993 - DNA, 461 bp, Homo sapiens
acattatcaagtagatttgtcttattttaaaagcgtatgaaggtcaatttaaaatgcactaccccttttttccaacacggagcttaaaacaaattaatgaaagagtggaaaattcaaaataagggcaagagataagctttttttctttttttcctttaagatagactcaggataggtagatagctttcactgatgtagatgtggaataaattattacttcaggaaaaaaattcccaaacatcttatgaaaaagtatacaactctacttcaaaatatgctatttactcactgccaaagacagttttatttgaaatcttgtttctgtatttaaaccctaattagccaccaaaaaaggttagtgcataataacctttcaaagttaaacaaaagccacaaaaattttgccacaaggcttaaaggattatctatttcaaatgctcatttccagatgtaactataag

SEQ ID NO: 1994 - DNA, 564 bp, Homo sapiens
atggggtccgggggcctggccgccgggatagccgggggtctggcaggaatgggaggcatccagaacgagaaggagaccatgcaaagcctgaacgaccgcctggcctcttacctggacagagtgaggagcctggagaccgagaaccggaggctggagagcaaaatccgggagcacttggagaagaagggaccccaggtcagagactggagccattacttcaagatcatcgaggacctgagggctcagatcttcgcaaatactgtggacaatgcccgcatcgttctgcagattgacaatgcccgtcttgctgctgatgactttagagtcaagtatgagacagagctggccatgcgccagtctgtggagaacgacatccatgggctccgcaaggtcattgatgacaccaatatcacacgactgcagctggagacagagatcgaggctctcaaggaggagctgctcttcatgaagaagaaccacgaagaggaagtaaaaggcctacaagcccagattgccagctctgggttgaccgtggaggtagatgcccccaaatctcaggacctc

SEQ ID NO: 1995 - DNA, 665 bp, Homo sapiens
  misc_feature 532: n = A,T,C or G
acaatcccagatttgacaaagctttcaaacatgtgtttggaaagactcttatttgtcgtagcatggaagtttcaacccagctggcccgtgctttcactatggactgtattactttggaaggtgaccaagtcagccgtcggggtgctctaactgggggttattatgacacaaggaagtctcgacttgaattgcaaaaagatgttagaaaagcagaagaagaactaggtgaacttgaagcaaagctcaatgaaaacctgcgcagaaatattgaaaggattaataatgaaattgatcagttgatgaaccaaatgcaacagatcgagacccagcaaaggaaatttaaagcatctagagatagcatattatcagaaatgaagatgctaaaagagaagaggcagcagtcagagaaaaccttcatgcctaagcaacgtagcttacagagtttggaggcaagcttgcatgctatggagtctaccagagagtcattgaaagcagaactgggaactgatttgctttctcaactgagtttggnagatcagaagagagtagatgcactgaatgatgagattcgtcaacttcagcaggaaaacagacagttgctaaatgaaagaattaaattagaaggtattattactcgagtagagacttatctcaatgagaatctg

SEQ ID NO: 1996 - DNA, 498 bp, Homo sapiens
aaaagaagccactttttccaatcctaaaaccactagcccaaataaaggcaaagagaaggaggctgaggatggcattattgcttatgatgactgtggggtgaaactgactattgcttttcaagccaaggatgtggaaggatctacttctcctcaaataggagataaggttgaatttagtattagtgacaaacagaggcctggacagcaggttgcaacttgtgtgcgacttttaggtcgtaattctaactccaagaggctcttgggttatgtggcaactctgaaggataattttggatttattgaaacagccaatcatgataaggaaatctttttccattacagtgagttctctggtgatgttgatagcctggaactgggggacatggtcgagtatagcttgtccaaaggcaaaggcaacaaagtcagtgcagaaaaagtgaacaaaacacactcagtgaatggtattactgaggaagctgatcccaccatttactctgg

SEQ ID NO: 1997 - DNA, 495 bp, Homo sapiens
actctgaggcttgtaggagggtaaaatagagacccagtaaaattgtaataagcagtgcttgaattatttggtttcggttgttttctattagactatggtgagctcaggtgattgatactcctgatgcgagtaatacggatgtgtttaggagtgggacttctaggggatttagcggggtgatgcctgttgggggccagtgccctcctaattggggggtaggggctaggctggagtggtaaaaggctcagaaaaatcctgcgaagaaaaaaacttctgaggtaataaataggattatcccgtatcgaaggcctttttggacaggtggtgtgtggtggccttggtatgtgctttctcgtgttacatcgcgccatcattggtatatggttagtgtgttggttagtaggcctagtatgaggagcgttatggagtggaagtgaaatcacatggctaggccggaggtcattaggagggctgagagggcccctgttagacctg

SEQ ID NO: 1998 - DNA, 491 bp, Homo sapiens
gggtttggctgtccggacggtgcagcggcgaggccggccgcgaagatgccagtggcggtgatggcggaaagcgcctttagtttcaaaaagttgctggatcagtgcgagaaccaggagctcgaggcccctggaggaattgctacacccccagtgtatggtcagcttctagctttatatttgctccataatgacatgaataatgcaagatatctttggaaaagaataccacctgctataaaatctgcaaattctgaacttgggggaatttggtcagtaggacaaagaatctggcagagagatttccctgggatctatacaaccatcaacgctcaccagtggtctgagacggtccagccaattatggaagcacttagagatgcaacaaggagacgcgcctttaccctggtctctcaagcgtatacttcaatcatcgccgatgattttgcagcctttgttggacttcctgtagaagaggctgtgaaaggcatatt

SEQ ID NO: 1999 - DNA, 248 bp, Homo sapiens
  misc_feature 33, 112, 135: n = A,T,C or G
gctttttttttttttttttttttttttttttgnttttttaaaaagtcatggaggccatggggttggctcgaaaccagctttggggggttcgattccttccttttttgtctanattttatgtatacgggttcttcnaatgtgtggtagggtggggggcatccatatagtcactccaggtttatggagggttcttctactattaggacttttcgctttgaagcgaaggcttctcaaatcatgaaaattat

SEQ ID NO: 2000 - DNA, 334 bp, Homo sapiens
acacagttagtgggagcacactatataaatcctttgcatgacaccattcaacaatattttttaaaatctacaaaattttaaagtttcacttccctagcaaaatatcttcagtcaagaaattagtctttgaaaattatgaaaattgttgtgggaaatatttatacaaattattactgataatgcacatatattttgaaacattgtttctagaagcaataaaatacaacctatttaggagataacccaaatgatttgtaaaaaaattaacttgtagaaaagggaaggatgttgtgtaaaatcaagtcaattatttgaggtttttataatattgagt

SEQ ID NO: 2001 - DNA, 292 bp, Homo sapiens
acatgacaaggtgcggctccctaggcccctcccctcttcaaggggtctacatggcaactgtgaggaggggagattcagtgtggtgggggactgagtgtggcagggactccccagcagtgagggtctctctcttcctcttgtgctcttgctggggctggtggtccaggggtcttactccttggaggccatgtgggtcatgaggtccaccaccctgttgctgtagccaaattcgttgtcataccaggaaatgagcttgacaaagtggtcgttgagggcaatgccagccccagcg

SEQ ID NO: 2002 - DNA, 324 bp, Homo sapiens
accccgaaaaaggaaactggttcccttggattatggtgaagatgataaaaatgcaaccaaaggcactgtaaacactgaagaaaagcgtaaacacattaagagtctcattgagaaaatccctacagccaaacctgagctcttcgcttatcccctggattggtctattgtggattctatactgatggaacgtcgaattagaccatggattaataagaaaatcatagaatatataggtgaagaagaagctacattagttgattttgtttgttctaaggttatggctcatagttcaccccagagcattttagatgatgttgccatggt

SEQ ID NO: 2003 - DNA, 372 bp, Homo sapiens
acggccagggctattggttgaatgagtaggctgatggtttcgataataactagtatggggataaggggtgtaggtgtgccttgtggtaagaagtgggctagggcatttttaatcttagagcgaaagcctataatcactgcgcccgctcataaggggatggccatggctaggtttatagatagttgggtggttggtgtaaatgagtgaggcaggagtccgaggaggttagttgtggcaataaaaatgattaaggatactagtataagagatcaggttcgtcctttagtgttgtgtatggttatcatttgttttgaggttagtttgattagtcattgttgggtggttggtgtaaatgagtgaggcaggagtccg

SEQ ID NO: 2004 - DNA, 447 bp, Homo sapiens
acagaaatattgtatatacttacatatgtaattgttgtaagagttaaatacaaaatcatggtgacacttccaattaagtgcactaaatgaaaagttaagtcacttattaacttttcagtttggtttgcaatgagaaagagtggaaatttgtattttgttttgcttatagaattacagacatgttgaggaagtgttgagctttattttgctttttcatagaggcagaaagtaggaaccagatagagatgaaaaggggccactgaaaagtgaatttgatagctcagcatttaagcatgattacatattcagatagctctttttgctttctataaatatatgcattgtgtgtgtagtaatagatgtaagtttacactttgaaaggaaatcttgtttcaatgtttattataaaagccttgctaatttagtagtgatgctttccttggttgt

SEQ ID NO: 2005 - DNA, 599 bp, Homo sapiens
  misc_feature 498: n = A,T,C or G
tttcactgcaaggcggcggcaggagaggttgtggtgctagtttctctaagccatccagtgccatcctcgtcgctgcagcgacacacgctctcgccgccgccatgactgagcagatgacccttcgtggcaccctcaagggccacaacggctgggtaacccagatcgctactaccccgcagttcccggacatgatcctctccgcctctcgagataagaccatcatcatgtggaaactgaccagggatgagaccaactatggaattccacagcgtgctctgcggggtcactcccactttgttagtgatgtggttatctcctcagatggccagtttgccctctcaggctcctgggatggaaccctgcgcctctgggatctcacaacgggcaccaccacgaggcgatttgtgggccataccaaggatgtgctgagtgtggccttctcctctgacaaccggcagattgtctctggatctcgagataaaaccatcaagctatggnataccctgggtgtgtgcaaatacactgtccaggatgagagccactcagagtgggtgtcttgtgtccgcttctcgcccaacagcagcaaccctatcatcgtc

SEQ ID NO: 2006 - DNA, 542 bp, Homo sapiens
acaaaaatatttaacagaactatgaaagatgcaggaaaggagtctttcttcgtagcaaagtagtcgttgctttgcatggtttcttttgtatactcttcagggtttgtttatctgccccatgaataacacagcacctgtaggattatgtcggatgaaaaacagaaaaggtctgtctactataaaccagggaggcgatgatcttgcaatgagaattgcagttgttgctgctgaagctttggttccatcttcactgacttcaatttttgctttttgcaagatatgagaaacatggaggttttctgaccttgttatttttgcaaaatttgcctttgatgaatcaaacatgtcagtaatgccaagaactttcagcggctccttcaaatctgtttgtgctacagctgtgaacttgggcaggatcacctgcaccctcttgggcaccatgatgctcatccagctgtctatggtcttggtgctgatgtgtgggatgatggcagacagcggagtggagctctcagtcggcagtgcaatcagcatgctgatgc

SEQ ID NO: 2007 - DNA, 291 bp, Homo sapiens
acttatgccagaatataaatcaacacattgcttcctttatcaaagaagtcttgttatttaaaaaaagtcaactgagccagtatgattagtgatgtaattgattttcattctggcacaagcctctttcattctggacagctcacaaatagttaatggaccatgctttgaatagccttcctctaagcaacatttataaatactgatattttagaactgtttacatttcttctgtttatttttgaattttcagtttgatatcttgtccttattcattgttgtataaacaactgt

SEQ ID NO: 2008 - DNA, 389 bp, Homo sapiens
acacatacatttttgcctatagctagcaattatttcattcagatacacacacacacacacacacagactacttaaaatagagagtgacttgagatatacaaaaacaggaagaaaagccctggaggtcatatagctaatgtataactgcacagcaagcagctatgtctaaagctaacaataaaaagaaaatgtgggagttgtgcaattagttttattctcattttttggaagaatatgttcctgggttctctaactaaaaggaaaaaattcaaaggaaagttgtaaatattaggaagtaactgaaaaataagaagcaagataaagtggggaggctatgagatcatataatgagctaataaacttttcaacaggggacacctgttctccct

SEQ ID NO: 2009 - DNA, 344 bp, Homo sapiens
  misc_feature 54, 72, 87, 94, 107, 118, 164, 173, 181, 213, 224, 227, 242,246, 299, 328, 343: n = A,T,C or G
caagctttttttttttttttttttttttttttttttttctttttttttcagttnctaagtcattactttttnttttgaaggatttgngaaactnttcacatcatggngagagtttgtntgattaataaaaagcagctttttcatgaaatgcttggaggtgaacnagttttcancctgtganatccgaccatcccattaactttgaagtttctnttgattaatanaanaaaaaaggggagggngaanaaaaggaggaacatgctaaaaaccttatgacaatcatccaaatgtgaggaaanaacaaccgattcaccaactccactttttntattttacaactttnt

SEQ ID NO: 2010 - DNA, 503 bp, Homo sapiens
ggaaagtggttagggagggagaggaggaagactgagaaatctctgcatccccagaactcagcaacccagctcttttatcatgaggagaggtagccatgctgactcatgaacaggtggaggaaaggggttgcaggtgaccagcatcttcaatctagttaccaccagcttggctagaattttattgaacgcaacttgctagttatgacagagaggaccagggtgagaactaatgctcaagagagcaagattctgtaatcctcttgccctctcacatcacaaattctgatatgccaaacatttggcccaatgagaatgactgatagacttgctgatgtgcatgtggggggatgaggtgtgtatatgcctttcccctgactggccattcagtgttcaggctgtcattcaaattggataggagaaagttggtgaggaaggaatggagagagcaggatccctggactccctggtccccaaactccttgactgtcacttgtaattgtata

SEQ ID NO: 2011 - DNA, 340 bp, Homo sapiens
acccggccaacatcaagtgactttatagctgcaagaaatgtggtatgtggagaagttctgtatgtgaggaaggaaaaaaagaaaataaaagtgtgtttgaaaaatattatcttgggttctttgtaaaatttattttttacatgctgaattagcctcgatctttttgattaagagcacaaacttttttttgtaaaacatgtaaaaaaaaaaaactgggattaatttttagtgttggaactgcctcttattttaggctgtagataaaatagcatttttaggttagccagtgtgactatgcacctaattttttatgagattaaattcataagacttaatctgt

SEQ ID NO: 2012 - DNA, 488 bp, Homo sapiens
cccctgtattggattgccacacggctcacattgcatgcaagtttgctgagctgaaggaaaagattgatcgccgttctggtaaaaagctggaagatggccctaaattcttgaagtctggtgatgctgccattgttgatatggttcctggcaagcccatgtgtgttgagagcttctcagactatccacctttgggtcgctttgctgttcgtgatatgagacagacagttgcggtgggtgtcatcaaagcagtggacaagaaggctgctggagctggcaaggtcaccaagtctgcccagaaagctcagaaggctaaatgaatattatccctaatacctgccaccccactcttaatcagtggtggaagaacggtctcagaactgtttgtttcaattggccatttaagtttagtagtaaaagactggttaatgataacaatgcatcgtaaaaccttcagaaggaaaggagaatgttttgtggaccactttggt

SEQ ID NO: 2013 - DNA, 327 bp, Homo sapiens
acattcttgcatctggtgaacattttcttgacattacagcaaatagctaatggtgatagcaccaattctcatagctcgtaaaccttatatttgttacacaatgtaataacaaagttataaatttataacaaaataatagtgttgaacatgtttcccttgaaagttctaacttacaaaataaagcccccaaagattagtctgaattaatgtatcattcaaagtgtagcaggattaatggctcagaattaagcaaattaattagaaacattgcataggacggagaacttccctgtatggaaaccaatctacagattgtttcttgtcctc

SEQ ID NO: 2014 - DNA, 244 bp, Homo sapiens
accggaagttctgttggtatgagagagacttgtctacaggcaggtaaacccaagtttgccaaacaaaggcagtaaccccagcgaccagctgctgctgctgcacggtgaggaggaggaggacaccatggacacgagtggaggctggatgggacaacgcagtggacatctgctaatgctctaacacggggttggtgtcacttctgagaagagcgaggtgagtggggatgctatacaagagggctgt

SEQ ID NO: 2015 - DNA, 241 bp, Homo sapiens
caccgaggtcgcacgcgtgagacttctccgccgcagacgccgccgcgatgcgctacgtcgcctcctacctgctggctgccctagggggcaactcctcccccagcgccaaggacatcaagaagatcttggacagcgtgggtatcgaggcggacgacgaccggctcaacaaggttatcagtgagctgaatggaaaaaacattgaagacgtcattgcccagggtattggcaagcttgccagtgt

SEQ ID NO: 2016 - DNA, 144 bp, Homo sapiens
accattctcttcacagaagagaggtcaaatatttccaaaggaaggcacccgatatttgtggttctggccttgcagccttctggagaatcttaaaaggaaaaaagctggctggctgtttttagaaactggaatgatgatacacgt

SEQ ID NO: 2017 - DNA, 162 bp, Homo sapiens
  misc_feature 155: n = A,T,C or G
acaagcttttttttttttttttttttttttttttctgggttatttttattttctttgctttggtctatacaaaaaaaccaataaccaaaaacataaagcgataataataaaacactctgcttggacctcccccagccccccacaccatgtgcggnaaatggg

SEQ ID NO: 2018 - DNA, 278 bp, Homo sapiens
  misc_feature 62, 78, 102, 181, 195, 197, 204, 211, 247, 273, 278: n = A,T,C or G
tttttttttttttttttttttttttcttaaaaatattacatgttttattatcctgtccccanagggtggtttatccanaaaccaagaaaaaaaatcaatcanaataaactcaaaaaaaaaaggtagggggagcaaaaccatcaaccaccaggcagccaggccatcagcccacctccacctntggagggtccccananacccacncccgacncaaacccggaggagcatcagcaaggggcccgggcanaaaatcggctatgtcttcattatganagcan

SEQ ID NO: 2019 - DNA, 186 bp, Homo sapiens
accatgtccactgcatcgatcgctggttatctgagaattctacctgtcctatttgtcgcagagcagtcttagcttctggtaacagagaaagtgttgtgtaattaagatctgaactctcagctatgtagctgatatagtgatgggcaaacaggaatcacttgcttttatgtccactttttgagtggt

SEQ ID NO: 2020 - DNA, 523 bp, Homo sapiens
  misc_feature 174, 278, 390, 494, 495, 501: n = A,T,C or G
ttttttttttttttttttttgttgttgtaaaattgaaatcaggcatttaacatactatgaaaacaccaggagtcaatgattaatgaaaggtgactcatctgtccctttttgttgtccatactcttcctatgaagagggaatgcgtatgaattaaggctactactgtcacagaanatcatagtctttgatgctacctcacaacacaaacaggtagttcgttgggggcaaatgaattagccaactgttaactggaagcttttgataatttttttttttanaacaatttggaacattaaaatttactgaatcgtatatattcatctgagataaaaatataaaaagaattatggaccctggatggcaatttgcttgatagcatctgatttgcanactcataatttgatttttaattaaatatataggttatgatgaagtgaatagacatatcagtgaacagttaactatattaaatttttatcatttactttttttannattcanacctcagttatataaatttcag

SEQ ID NO: 2021 - DNA, 396 bp, Homo sapiens
  misc_feature 346: n = A,T,C or G
acaaggctacagactgtatgattccatttatatgaaatatacatactaggcaaatccatggagatggaacatagattagtggttgccagcggatagaggagtaattgttagtgggcatgggatttgtttttgggaggttttgaaaatgttctggagttgaacaatagtaatggttgcatgatttggtaaaaatactaaaaactatggaattgtttaattatggtatatgaattaatttctttctttttttcttttttttttttttttttgacacggagtctcactctgtcgcccaggctggagtgcagtggtgtgatctcgtctcactgcaacctccgcctcccanattcaagcgattctcctgtctcagcctcctgagtagctgggattataggt

SEQ ID NO: 2022 - DNA, 493 bp, Homo sapiens
cggccgaggtaccacatcttaaatactctccagtgttctgagtctattatgggaggagcagtctttgagacactggaaggaaatacaattgagataggatgtgacggtgacagtataacagtaaatggaatcaaaatggtgaacaaaaaggatattgtgacaaataatggtgtgatccatttgattgatcaggtcctaattcctgattctgccaaacaagttattgagctggctggaaaacagcaaaccaccttcacggatcttgtggcccaattaggcttggcatctgctctgaggccagatggagaatacactttgctggcacctgtgaataatgcattttctgatgatactctcagcatggatcagcgcctccttaaattaattctgcagaatcacatattgaaagcaaaagttggccttaatgagctttacaacgggcaaatactggaaaccatcggaggcaaacagctcagagtcttcgtatatcgta

SEQ ID NO: 2023 - DNA, 515 bp, Homo sapiens
  misc_feature 333, 392, 396, 454, 475, 495: n = A,T,C or G
aattacccccacactccttacactattcctcatcacccaactaaaaatattaaacacaaactaccacctacctccctcaccaaagcccataaaaataaaaaattataacaaaccctgagaaccaaaatgaacgaaaatctgttcgcttcattcattgcccccacaatcctaggcctacccgccgcagtacaagcttttttttttttttttttttttttttctaacaactggtcatcaatttattaaaatagttgacttaagcatctgcaatggtgacttccacctcaactcctggctcaatactgatggaagtaatctgcttaacaatctcanaaggactgtgcaagtcaatgagtcgcttgtgaattctcatctggaaacgatcccacgtnttanaaccttcaccacaaggagtttttctcgtagtgattctcaaagtcttggtaggcattcnaactggtcctttcactttganattcttttcttttgcgcctnttatcaagtcagcacacacc

SEQ ID NO: 2024 - DNA, 381 bp, Homo sapiens
actcgagctcccagcgcggcgtcccctgagcattcgcctggctcaggttcatgaagtaggtcaccatgtccttcaggctcagtgtggctcggtcatattcgaacacccggatggctggattgttggccccattgaccactccaggtaatgtggttttccatggggtgactccaggtgtgatgaacatggcgcttatggggacaccggcatcatcatagagcatccgaaagctgtcggtgtggtggtgcccgaagaactgccctgctatgacgcgatgatgcttccgggccaccttcaggtatttttcattgaagccctcccggaaccatgccttgttttgcgtcttctcaaagaaccccgggggcacgtggccgacaatgt

SEQ ID NO: 2025 - DNA, 514 bp, Homo sapiens
caggacacagcatggacatgagggtccctgctcagctcctgggactcctgctgctctggctcccagataccagatgtgacatccagatgacccagtctccatcctccctgtctgcatctgtaggagacagagtcaccatcacttgccgggcgagtcagggcattagcaattatttagcctggtatcagcagaaaccaggaaaagttcctaagctcctgatctatgctgcatccactttgcaatctggggtcccatctcggttcagtggcagtggatctgggacacatttcactctcaccatcggcagcctgcagcctgaagatgttgcaacttatttctgtcaaaaatataacagtgcccccgggacgttcggccaagggaccaaggtggacatcaaacgaactgtggctgcaccatctgtcttcatcttcccgccatctgatgagcagttgaaatctggaactgcctctgttgtgtgcctgctgaataacttctatcccagagaggccaaaat

SEQ ID NO: 2026 - DNA, 272 bp, Homo sapiens
acttagaataaaattcaaacatgttccaaccacccagacagaggtagtcactgctggtaacagaggtctaggagtccatcctgtcctgcagccttcatctgggcctctccccagccccagagggcaggtcctgtttggtccagccttccaggcggtcccattcttttggccagggattggttgagcggtgggcggcgctggtgaatgagaccggaaaagacgctgctgggtgaggtttctgctgctggatgcggtttctcgttcctacaaag

SEQ ID NO: 2027 - DNA, 280 bp, Homo sapiens
acattgtttcatacacaaataattgactgactatccaagcacaggacaggcatctctcttgaaaacagaggttcctcctagttgggggtggggtagtgttaggctattataaacttccctccaacttcacaaggaaacccaaagtgagattaaaaactcaactgagaagatagacaggatgggtcaggaggaacatggtgctggatctgagctcacttttcagcaaaggtgaaggattctctgatcacgcatttgagaccgtccccgcatgtgcttggcc

SEQ ID NO: 2028 - DNA, 502 bp, Homo sapiens
  misc_feature 446, 466, 489, 502: n = A,T,C or G
gggagacaatcgctttagcatgctggtagctgccatccagtctgcaggactgacggagaccctcaaccgggaaggagtctacacagtctttgctcccacaaatgaagccttccgagccctgccaccaagagaacggagcagactcttgggagatgccaaggaacttgccaacatcctgaaataccacattggtgatgaaatcctggttagcggaggcatcggggccctggtgcggctaaagtctctccaaggtgacaagctggaagtcagcttgaaaaacaatgtggtgagtgtcaacaaggagcctgttgccgagcctgacatcatggccacaaatggcgtggtccatgtcatcaccaatgttctgcagcctccagccaacagacctcaggaaagaggggatgaacttgcagactctgcgcttgagatcttcaaacaagcatcancgttttccagggcttcccanaggtctgtgcgactagcccctgnctatcaaaagttn

SEQ ID NO: 2029 - DNA, 360 bp, Homo sapiens
actatcatcccccaaggccttttacagtctgaaatatcaaaattgaaagcaaaaataggatgaccaaaggactactattttacctcttttcagaactctacaatagtagaaactaaattcccttatggatctcagggggaaataatgtgcctgttgaaggggctcagtgtttggtgtccaggctggcatttttcaggtgagggtttcatactgacaggaggcaggcccctaaaacaaggcggtagcaccagcaccatgactagggctgctttaaaacaaatttctaggacttacgctctttgggcctgatttgttaatgcttatgaggtaatgatattatgtttgagaagctctacttct

SEQ ID NO: 2030 - DNA, 192 bp, Homo sapiens
acaagttctacctggccttcgagaactccttgcaccccgactacatcaccgagaagctgtggaggaacgccctggaggcctgggccgtgcccgtggtgctgggccccagcagaagcaactacgagaggttcctgccacccgacgccttcatccacgtggacgacttccagagccccaaggacctggcccggt

SEQ ID NO: 2031 - DNA, 560 bp, Homo sapiens
actgacctgaaggagacctaagagtcctttccctttttgagtttgaatcatagccttgatgtggtctcttgttttatgtccttgttcctaatgtaaaagtgcttaactgcttcttggttgtattgggtagcattgggataagattttaactgggtattcttgaattgcttttacaataaaccaattttataatctttaaatttatcaactttttacatttgtgttattttcagtcagggcttcttagatctacttatggttgatggagcacattgatttggagtttcagatcttccaaagcactatttgttgtaataacttttctaaatatagtgcctttaaaggaaaaatgaacacagggaagtgactttgctacaaataatgttgctgtgttaagtattcatattaaatacatgccttctatatggaacatggcagaaagactgaaaaataacagtaattaattgtgtaattcagaattcataccaatcagtgttgaaactcaaacattgcaaaagtgggtggcaatattcagtgcttaacacttttctagcgttagt

SEQ ID NO: 2032 - DNA, 320 bp, Homo sapiens
acaccttgttggaggcttcagtgacgacaggcagttgtcacaaaaactcactcatcaacttcttagtgaatttgacaggcaagaagatgacattcacttagtgacattatgtgtgacagaattaaatgaccgggaagaaaacgaaaaccactttccagtaatatatggcattgctgtcaacattaagactgcagagatttacagagcatcctttcaagatcggggtccggaggagcagcttcgtgctgcgcgaactttagcaggaggaccaatgattagcatttatgatgcagagacagaacaacttcgtataggaccgt

SEQ ID NO: 2033 - DNA, 344 bp, Homo sapiens
acaaatatgaatacattataatttgtaactgcatttaaaaattaaaatatttctctccaaatccaaaacaccacacaatctttatctgttctcatcttgttaccttagaaacatttgtcatatgctatcaggaaaatataggcaagacttactaatcagttattcatgatcaaagaaacatgattctccttaactgtgactttttgaatcatttatctgtatttctgaaataccacacaattatacctctactctagagaaaaaaagaataaatacaaatatcaaggaggcaggaacattcatggaattaaagcaaaagtcacaagtgtttgacttagaaatgt

SEQ ID NO: 2034 - DNA, 582 bp, Homo sapiens
  misc_feature 489: n = A,T,C or G
aaaccgatgagtcattcaacccaggtgaagaggaggaagatgtggcagaggagtttgacagcaacgcctctgccagctcctccagtaatgagggtgacagtgaccgggatgagaagaagcggaaacagctcaaaaaggccaagatggccaaggaccgcaagagccgcaagaagcctgtggaggtgaagaagggcaaagaccccaatgcccccaagaggcccatgtctgcatacatgctgtggctcaatgccagccgagagaagatcaagtcagaccatcctggcatcagcatcacggatctttccaagaaggcaggcgagatctggaagggaatgcccaaagagaagagagaggagtgggatcgcaaggctgaggatgccaggagggactatgaaaaagccatgaaagaatatgaagggggccgaggcgagtcttctaagagggacaagtcaaagaagaagaagaaagtaaaggtaaagatggaaaagnaaatccacgccctctaggggctcatcatccaagtcgtcctcaaggcagctaagcgagagcttcaagagcaaagagtttgtgtctagtgatgag

SEQ ID NO: 2035 - DNA, 172 bp, Homo sapiens
actcagcattcccgtgaacacacacccccttggactcttgggagaaagaacggagaaggccgttcgttggagactgccccggggcggccacctggccagacccccactcccggtgcacacccagtggatggagcgagcgctcagggctggggtgggtgcatcagccaagcgt

SEQ ID NO: 2036 - DNA, 343 bp, Homo sapiens
acactacatgttcaaatctgtaatctttcacagcacagtaacaaagttattaggaaaacaggactaccacaaagatgttacagagtgcacacaattctggcagagagagccatgatcaaagagtggttttctttaggaaacaattctactaaaaaacaacatggtaatagaagtaatttaaaatgttcaagacattaaatgcaggactgactccatattgccatttaatatgctttgtattataggatataaaaactaaccccccatctgtggaatgttaagctgacacccgagacagtcagagcctcccataattcaatatcccacactattttctagttgt

SEQ ID NO: 2037 - DNA, 335 bp, Homo sapiens
cgcgggctctcaaggaaagtagtcgcggaatctcagttagcggtggagaggcagtatgtccggttcaatggcgactgcggaagctagcggcagcgatgggaaagggcaggaagtcgagacctcagtcacctattaccggttggaggaggtggcaaagcgcaactccttgaaggaactgtggcttgtgatccatgggcgagtctacgatgtcacccgcttcctcaacgagcaccctggaggagaagaggttctgctggaacaagctggtgtagatgcaagtgaaagctttgaagatgtaggacactcttctgatgccagagaaatgctaaagcagt

SEQ ID NO: 2038 - DNA, 221 bp, Homo sapiens
  misc_feature 38, 150, 205: n = A,T,C or G
acaagcttttttttttttttttttttttttggctctanagggggtagagggggtgctatagggtaaatacgggccctatttcaaagatttttaggggaattaattctaggacgatgggcatgaaactgtggtttgctccacagatttcanagcattgaccgtagtatacccccggtcgtgtagcggtgaaagtggtttggtttanacgtccgggaattgca

SEQ ID NO: 2039 - DNA, 358 bp, Homo sapiens
aagaaagctcagctggtggtgattgcacacgacgtggatcccatcgagctggttgtcttcttgcctgccctgtgtcgtaaaatgggggtcccttactgcattatcaagggaaaggcaagactgggacgtctagtccacaggaagacctgcaccactgtcgccttcacacaggtgaactcggaagacaaaggcgctttggctaagctggtggaagctatcaggaccaattacaatgacagatacgatgagatccgccgtcactggggtggcaatgtcctgggtcctaagtctgtggctcgtatcgccaagctcgaaaaggcaaaggctaaagaacttgccactaaactgggttaaatgt

SEQ ID NO: 2040 - DNA, 159 bp, Homo sapiens
acggtaactgactccagggtcactcatactgtgtccgtggtaacggtaagtctgcagctccatcaggatgggccccttcccagatctacaataggcagcagcaaaccttgttgcctctcggacgcacaggatatccattccatccactctcagcccagg

SEQ ID NO: 2041 - DNA, 239 bp, Homo sapiens
  misc_feature 4, 54, 77, 115, 133, 172, 191, 193, 232, 233: n = A,T,C or G
gcanattgtgacagaccattcccatcggccaagtggtcgaacccgacatccaanacccagcgagcagccaagctcancgcaacctccgggcttttcgctctgactccaaaagggngagcacgtcgccctcgcncacggggccttttacattgcggatgatggatcggctcgngtcgtccatgaattccacncncacctgcgtgcactgtccctgaaaaccggtcctgcccannaccttg

SEQ ID NO: 2042 - DNA, 590 bp, Homo sapiens
acatttttgttacagacagaaggctgattttggaaagaaagaaacaataggatgtatagtgctttctatcagcagactagtatgtttaaaaatagtctcatcaagggttctgaataagaaatataaatgttgccaggcagtcccaaactcacatttgatattaactgcagactcatttaaaactgaaaactgctccagcctctctcaatctttactaaggactgggagattatcaaaccctttcaagtctaataatgcttttgaattaagattattgaaaaaaggaatctctgttacagtgcaaagaacattttgatagaaattcatgtctacaaaggagttaaatacagatgtcccttacattagcagatactattcttgctctaaaaaggtagaattatcaagacattgtaaataatatgggtcaaaaatatgtgtaacagatttctacagggcaccttatataaagtcaatcctcaaagtacgtatttgacactctccaagtgaggatattacttttttgaagaacattagacacaacagtagcctcttattattccattaactattgaggtaggagtctccatttg

SEQ ID NO: 2043 - DNA, 473 bp, Homo sapiens; identical to SEQ ID NO: 175

SEQ ID NO: 2044 - DNA, 355 bp, Homo sapiens
accattggggttaagtcattttcccaatctatttataatttaatgatatgttagtgcctctgttatatgtcaagtttaaagcagggcacattgttgcagcaaaatgtgtatttgacaaattatacttgcaattttgggtcatgaaagtttgcaatatagtaaatgcacgattgactgttgctttgtgcctcagtatttaatttgtttcagtaaacttactttattactgtttatgatttcagataaaaatagttgctgagtaaattttacttgtaatctacaattggctttttaaaaataacctgttgatatataattgtcagtccaaatgaatatgtgaaacagctggaattgt

SEQ ID NO: 2045 - DNA, 380 bp, Homo sapiens
  misc_feature 321, 348, 351, 354, 358: n = A,T,C or G
gcaaaaccccactctgcatcaactgaacgcaaatcagccactttaattaagctaagcccttactagaccaatgggacttaaacccacaaacacttagttaacagctaagcaccctaatcaactggcttcaatctacttctcccgccgccgggaaaaaaggcgggagaagccccggcaggtttgaagctgcttcttcgaatttgcaattcaatatgaaaatcacctcggagctggtaaaaagaggcctaacccctgtctttagatttacagtccaatgcttcactcagccattttacctcacccccaaaaaaaaaaaaaaanggaaaaaaaaaaaaaaaaaaaaaaaanctngtncaancttttttttttttttttttttt

SEQ ID NO: 2046 - DNA, 229 bp, Homo sapiens
accagatgctagctgggcctggtgggtatccacccagacgagatgatcgtggagggagacagggatatcccagagaaggaaggaaataccctttgccaccaccctcaggaagatacaattggaattaagcttttgtaaagctttcccaaatcctttcatcattctacagttttatgctatttgtggaaagatttctttctcaagtagtagtttttaataaaactacagt

SEQ ID NO: 2047 - DNA, 477 bp, Homo sapiens
ggacgcaccgggtgttgatggtcgagatggtctccgggagcggcgaggctttagcgagggagggaggcagaacttcgatgtgaggcctcagtctggggcaaatgggcttcccaaacactcctactggttggacctctggcttttcatccttttcgatgtggtggtgtttctctttgtgtattttttgccatgacttgttcgctgatatctaaattaagaagttggttcttgagtgaattctgaaaatggctacaaacttcttgaataaagaagacaggactctcaatagaagaatttcacatctccaagggacccttcctttcattttacactttgttactaatttgcagaactctattaattgggtaggatttcacccattcctagctaagttcttaaaattaaaccctttggttcgtgtttaaaaactttcaaacatctgatggctttacaggggctgaatataaaagcatttgt

SEQ ID NO: 2048 - DNA, 297 bp, Homo sapiens
agctttaaaacctgtgtgccattttaagagttacttaatgtttggtaacttttatgccttcactttacaaattcaagccttagataaaagaaccgagcaattttctgctaaaaagtccttgatttagcactatttacatacaggccatactttacaaagtatttgctgaatggggaccttttgagttgaatttattttattatttttattttgtttaatgtctggtgctttctgtcacctcttctaatcttttaatgtatttgtttgcaattttggggtaagactttttttatgagt

SEQ ID NO: 2049 - DNA, 499 bp, Homo sapiens
tggcagtgcaaatatccaagaagaggaagtttgtcgctgatggcatcttcaaagctgaactgaatgagtttcttactcgggagctggctgaagatggctactctggagttgaggtgcgagttacaccaaccaggacagaaatcattatcttagccaccagaacacagaatgttcttggtgagaagggccggcggattcgggaactgactgctgtagttcagaagaggtttggctttccagagggcagtgtagagctttatgctgaaaaggtggccactagaggtctgtgtgccattgcccaggcagagtctctgcgttacaaactcctaggagggcttgctgtgcggagggcctgctatggtgtgctgcggttcatcatggagagtggggccaaaggctgcgaggttgtggtgtctgggaaactccgaggacagagggctaaatccatgaagtttgtggatggcctgatgatccacagcggagaccctgttaactacta

SEQ ID NO: 2050 - DNA, 547 bp, Homo sapiens
  misc_feature 462: n = A,T,C or G
gtaggttgttgatcattatgaaaatcctagaaacgtggggtcccttgacaagacatctaaaaatgttggaactggactggtgggggctccagcatgtggtgacgtaatgaaattacagattcaagtggatgaaaaggggaagattgtggatgctaggtttaaaacatttggctgtggttccgcaattgcctccagctcattagccactgaatgggtgaaaggaaagacggtggaggaagccttgactatcaaaaacacagatatcgccaaggagctctgccttcctcccgtgaaactgcactgctccatgctggctgaagatgcaatcaaggccgccctggctgattacaaattgaaacaagaacccaaaaaaggagaggcagagaagaaatgagccctcccccggcgaagcctccagcaggccacaccagctgtttcccacctgctgtgcagtcaccttanatgttcagaagccgcttcctctccactgaagagctatgggatacgcacaatacttgctgttcacgttatgactctcatgcaagca

SEQ ID NO: 2051 - DNA, 222 bp, Homo sapiens
acagggtattaaacaaataccaaggggaacagttaacttcaatacaaggtcaaaatcagcaacaagttctacaatccagtgctgatatcagatacaagcttcaaggacaatttcttttcgaaggcttattccagtttcgtgaggctagcatgaggtgtgtgcatttgccaggggcaaatttctattctcaattaacccatgcagcaaatgctacgcatctgc

SEQ ID NO: 2052 - DNA, 487 bp, Homo sapiens
acaggtccccggaggcatcctggctgggtgggaagtttctggcggtcacgccctgtccgctttcgctccaggtcacactgagtggctcctgggggaagaagccctggaccaggcaggcgatgaccacgttcccatctggctgggtgctgcagaggctcagcgggaagaccttggggctggtcggggatgctgaagagacggtgaccagggatccctggccccagtgatcaaaggccgaatatctccccccgtccttgccctttgcacagtagtataaggccgtgtcttcagttctcaggctgttcatttgcagaaatagggagttcttggcgttgtctcttgagatggtgaatcggcccttcacagagtccgcatagtctatactaacgctatcccaactgatacctgagacccactccaggcccttccctggagcttggcggacccagtgcatggcaaaatcatcaaaggtgagtcctgaggttgt

SEQ ID NO: 2053 - DNA, 391 bp, Homo sapiens
  misc_feature 380: n = A,T,C or G
atctcccaggaggaagtggaggggacatcgctgttccccagaaacccactctatcctcaccctgttttgtgctcttcccctcgcctgctagggctgcggcttctgacttctagaagactaaggctggtctgtgtttgcttgtttgcccacctttggctgatacccagagaacctgggcacttgctgcctgatgcccacccctgccagtcattcctccattcacccagcgggaggtgggatgtgagacagcccacattggaaaatccagaaaaccgggaacagggatttgcccttcacaattctactccccagatcctctcccctggacacaggagacccacagggcaggaccctaagatctggggaaaggaggtcctganaaccttgaggt

SEQ ID NO: 2054 - DNA, 533 bp, Homo sapiens
  misc_feature 387: n = A,T,C or G
ttttttttttgttaggactccgatgagtttgggacttcaggaaaaatcaacccagcaccagcagctaccaaccaccattccatctcttcacttgaacagcattagttaagtccagatgtgggaacccttctcttggaagaagttcctaattgtgtctcagaccggtgtaaacaaaccagccagccgccaccttgctaaacctataagctttttaaaatccaatatattctgccaagaatatgccttgatagttagccctcagcccataggtgttttttgttttttaacagaattatatatgtctgggggtgaaaaaacccttgcattccaaaggtccatactggttacttggtttcattgccaccacttagtggatgttcagtttanaaccattttgtctgctccctctggaagccttgcgcagagcttactttgtaattgttggagaataactgctgaatttttagctgttttgagttgattcgcaccactgcaccacaactcaatatgaaaactatttaacttatttatta

SEQ ID NO: 2055 - DNA, 344 bp, Homo sapiens
taccttggatttaggagctccatggggaactgactaaaccaggagagagaggatttggagctagtcagtcctggtaatctatgaaatgctcatttatacccaggtttcataagcttccaattctatagcaaacccaggctctgagtgttttagaatttcctaattcatgaagtgtttcttgtcttgatcccgtgaccaacagttgaaggttgataaggacttttctacagtctgaacacaacctaaagccctctttcattgttcacacactaactcctactgccgacgaaccgaaaaataattaatgcagaggagatttatgtcttagccataactccagttgt

SEQ ID NO: 2056 - DNA, 211 bp, Homo sapiens
actttgggaggctgaggccggcagatcacctgaggtcgggagtttgagaccagcctgaccaaaatggagaaaccatgtctctgctgagaatacaaaattagctgggcatggtggtgcatgcctgtagttccagctactcaggaggctgaagtgagaggactgcttgagcccaggaggtctaggctgcagtgaactatgatcatgccactgg

SEQ ID NO: 2057 - DNA, 497 bp, Homo sapiens
actagaagaccttcctcgccactctctccacatgagagagtcagctgccctttctcctgtgcctctgcaggaagaactctcttgcatggcacatctcagctcctcattgagggatagttttctttgataagaaacctggagtccatttactctgacctctctttaaatctatatccagagccactagcccaggaaaaacttgggtgacccgtaatttctcttctcctgctgtccttttgctcttacgccccaccccaactccccttaaattttacaggcttatgacagtttgtatgtgctcagccaatgagcagaaaacctggaaagaatttctggactttagcccaccagtttgtctggttgactaacctgctgagagctaaaattggcacccattgccccgtgccttcaggcagtctcctggggcagagtatgctaccatccgaatatcaggcactgagtgggatgtgggtgatgctcacatgactggctagagc

SEQ ID NO: 2058 - DNA, 282 bp, Homo sapiens
acatgcagatgaattagaagaacttatcaactactatcaggatcgtggctattttgaagagctgatcaccatgttggaagcagcactgggacttgagcgagctcacatgggaatgtttactgaattagctattctatactctaaatttaagcctcagaaaatgagggagcacctggagctgttctggtctagagtgaatattcccaaggtgctaagagctgcagaacaagctcatctttgggcagaactggtgtttttgtatgacaagtatgaagaatatga

SEQ ID NO: 2059 - DNA, 167 bp, Homo sapiens
caggtactacactttatcttaattcttaatttaaaaacatgtttacaagttacaaccaacttctatgaaaagttgaaaagacaaaaaaaaaaaaaaaagcgagcgagagagagagcgagagagagagcgagagcagaagaaattcctaaaagtcgatttatttttgt

SEQ ID NO: 2060 - DNA, 282 bp, Homo sapiens
gctgaacagggctccctgtgatctgaagaaagcttttggtgcttgtcctcacaaccacctcagtcctccctccctgtcctcccctgtctcctttcctcctcctgggttcatgttgtaataaaagaagattgttggtgtgtaattaatttgttcaaaagaaaaaaaaagcaaaacaagaaacttggttccaactgaagcctattttaattttattttattattttcctcttgttagaaataaaacccttagaaacattttttgaaaaaaaaaaaaaaaaaaaa

SEQ ID NO: 2061 - DNA, 229 bp, Homo sapiens
gcccactggaggatataccgccccaccactggggccctcctgctgctcactgcccttcagctctgtgaccaggtgagtgcttatggcttcatcactgagggccatgagcgcttttctgatcactactatgatacatcatggaagcggctgatcttttacataaaccatgacttcaagctggagagagaagtctggaagcggctacacgatgaagggataatccggctgt

SEQ ID NO: 2062 - DNA, 417 bp, Homo sapiens
acctaatatttttaaacttgtaaattaacaacaataaaatactacaagagttaaaataaacgtgaaggaagaaaattacagagggaaaaatgctcaatccaaaacatttagtaataataaaaaagcagctaaatgaaaaagggagaattgtgattacactgtcaatggcaggatacgctgtggtgttataaggagattgggtctggtttctaatcaaggactgtaaaatgtttaataattctatttgtataaactgaaactagcccttattttctaggcaacaagttggcaaaaaccttgggtttacccataaagtgaatttcttaagatattttttaagaactcctgtcctgttatatccagagacattatcaaattttaaaaggcaaataattcaaaaagaaacagctattcagt

SEQ ID NO: 2063 - DNA, 469 bp, Homo sapiens
acttttttgttttattttttctctagcttatccctgcacaattattagagtgaatgaaaaaccactttcctgctttccattgttataaattctaagcttaagataaaagtggttctttacatgactgaatcaattacaatttatgggctagagccaaataggttgaagacaatcatccaaacagatcaatggaatagaatttcattggaaatgtaaaacactttcccaacaatggtcacgactttcttctgtttttgagaagagtttcatatgctggaccacattttagcttttattgttttttttttcccattgtccaaaaagttaagcaacaagtggccacacttttacgtgactacaacctggagttctgcaaagaaggtaatatttacttggtctttgactaaagttatctccccattctatggttacattttattttggactatggggacttctaatacgtttt

SEQ ID NO: 2064 - DNA, 555 bp, Homo sapiens
  misc_feature 472: n = A,T,C or G
cagcactgtctaagctagtaaaaattggaaacaatttaagtatctagcacattggattggttataaagcaaggaatgttcacacagtaggatattataagtatgctgatggaaatctatattgccaggaaaagctattcattatgcgttgtgaagtcagaaagtaaaaaagggtagatagaagtattcgaagtatagttccattttttgagactaataaaacatatgtttaaaaggacactaaaaactggagttatagatatccagatagaaacagtagttatctttgggtagaagaataatgagtgatctttacttttttactttttattcatctttgtgtttttatttatctaaaatgggtattgatttttaggacggttttgaaaaagaaaagtgttgggaatgaagcaagtgattgattggaaaacatactgaatggaagaaatatttagattaaaaatgaggtaggnttgaagtttcttctctgaaatgatagataaatggtgaagataaggcttattgtgaggattcagtgaggtaatatatgcaaagt

SEQ ID NO: 2065 - DNA, 352 bp, Homo sapiens
actacatatttcagcactaaggcggttgcttcactttatatctatataaaaaaagtggtaaaaatcttttccttttgtgcagttgaacccatcctacattcagattctctcaagcactaataaaatacttatttggttgaggaggatttaaggcaagttcgggcccttccaaaggcactgtgagactccccccccactccccgttattgctacatgtctttatactcgagtatgtcacagtagaactggtggaataagcaaacacttttttgctagtttataaagttggaattagaaaagtatgccacatttcagcctgattgcaaagtatgtggtcatttttttctttgaa

SEQ ID NO: 2066 - DNA, 385 bp, Homo sapiens
  misc_feature 352, 382: n = A,T,C or G
acaatctttatcttaagacttgagaactggaatgcaggaaaacaaactttggtggaatactggaataaaagacataaagctgggcagaactaggtgtggcaaccttgtatgttaattctgaaagccagaccagtgacgctaagaataacaaatagattcagatttgtttttcagaaacttgagctatttcggccaggtgcactgtctcacacctgtaatcccaacaatttaggaggtcaaggtgggagaatcacttgagcccaggagttcaagaccggcctaggcaacacagtgagaccctgtctccctgtctctacttcttttttttttttttttttttttttttttgganacggagtcttgctcctgtcacccaggctanagt

SEQ ID NO: 2067 - DNA, 561 bp, Homo sapiens
  misc_feature 542: n = A,T,C or G
aggttgttgatcattatgaaaatcctagaaacgtggggtcccttgacaagacatctaaaaatgttggaactggactggtgggggctccagcatgtggtgacgtaatgaaattacagattcaagtggatgaaaaggggaagattgtggatgctaggtttaaaacatttggctgtggttccgcaattgcctccagctcattagccactgaatgggtgaaaggaaagacggtggaggaagccttgactatcaaaaacacagatatcgccaaggagctctgccttcctcccgtgaaactgcactgctccatgctggctgaagatgcaatcaaggccgccctggctgattacaaattgaaacaagaacccaaaaaaggagaggcagagaagaaatgagccctccctcggcgaagcctccagcaggccacaccagctgtttcccacctgctgtgcagtcaccttagatgttcagaagccgcttcctctccactgaagagctatgagatacgcacaatacttgctgttcacgttatgactctcatgcangcaaatacacagtttcatt

SEQ ID NO: 2068 - DNA, 396 bp, Homo sapiens; identical to SEQ ID NO: 1438

SEQ ID NO: 2069 - DNA, 75 bp, Homo sapiens
  misc_feature 38, 46, 52: n = A,T,C or G
acaagcttttttttttttttttttttttttttcttganacaggctntcactntatctcacccaggctggagtgca

SEQ ID NO: 2070 - DNA, 489 bp, Homo sapiens
actgagtcaatatccatgctgaggctgcctaaggctgtcatagtagtgctaaatttttataagcattgctattatatccagccctttagattcaacattaattaaaaaaccataaataaaacaatcatgctctatattgcaactattgccacatataaggtttgtttcctggtatcactatttaaaaagcctcaagctctagaaggtcatcaatcaataacatttagataggctacaatagcagagtaaaagcactaaacccaggatcaaatcctgagttttcaatattaatttatatattattactctgagtttagagaagtcatatatccttttatattcagttttgctcatctataaatgggacaataaaaccagtcatgcctatttaacagggtgcttttgacaggttaaatggaaaaatgtatgggagcatgtttcaaagcaataaacaaacacaagctatatttctacgtgggtataattcac

SEQ ID NO: 2071 - DNA, 457 bp, Homo sapiens
acgattatcccttattttacagacaaggaatcagaggctcagagaggttaagtgttttgctcaaggtcacacagaaaatgggagtgggggtaggggtagagttgagaggcaaagcagcttgttaactcccaggcccagtaaccgggtcgctggcccctgaggctctgggaccatttgtgtccagtgttatgagcaacgccagagctatctatttgcccaccttcctccctcccctgcagtctgcgctcctcagaccaccggcaggtgaacagcctgatgcagaccgaggagtgcccacctatgctagacgccacacagcagcagcagcagcaggtggcagcctgtgagggccgggcctttgacaacgagcaggacggcgtcacctacagctactccttcttccacttctgcctggtgctggcctcactgcacgtcatgatgacgctcaccaactgat

SEQ ID NO: 2072 - DNA, 505 bp, Homo sapiens
acttgactttttcacacatttgctaatacccttctcataggttttatttctttctgatgtttcagctaacactgagttaacagaagctaaataataataaaatgaagaacagatagtaaatatattgaaattgtcattcctggccgggtgtggtggcttacgcctataatcccagcactttgggaggccaaggcaggcagatcacgaggtcaggagatcgaggccatcctggccaacatggtgaaaccctgtctccactaaaaatacaaaaattagctgggtatggtgacgcatgcctataatcccagctactcgggagactgaggcataagaatcacttgaacccaggaggtcgcgccgctgcactccagcccggtgacagagcaagactccgtctcaaaaaaaaagaaagaaaaagaaattgtcattcttaacataaattcccatatcactaaaatagatcagagaggtagaatgaaattttctctagcataggcatcattac

SEQ ID NO: 2073 - DNA, 471 bp, Homo sapiens
gggccggcggtgcagtcacgggggagcgaggcctgctgggcttggcaacgagggactcggcctcggaggcgacccagaccacacagacactgggtcaaggagtaagcagaggataaacaactggaaggagagcaagcacaaagtcatcatggcttcagcgtctgctcgtggaaaccaagataaagatgcccattttccaccaccaagcaagcagagcctgttgttttgtccaaaatcaaaactgcacatccacagagcagagatctcaaagattatgcgagaatgtcaggaagaaagtttctggaagagagctctgcctttttctcttgtaagcatgcttgtcacccagggactagtctaccaaggttatttggcagctaattctagatttggatcattgcccaaagttgcacttgctggtctcttgggatttggccttggaaaggtatcatacataggagtatgccagag

SEQ ID NO: 2074 - DNA, 150 bp, Homo sapiens
cccaacacaggcatgctcataaggaaaggttaaaaaaagtaaaaggaactcggcaaatcttaccccgcctgtttaccaaaaacatcacctctagcatcaccagtattagaggcaccgcctgcccagtgacacatgtttaacggccgcggt

SEQ ID NO: 2075 - DNA, 412 bp, Homo sapiens
  misc_feature 206, 363, 378: n = A,T,C or G
acctattttgtatgtgtataataatttgagatgtttttaattattttgattgctggaataaagcatgtggaaatgacacaaaaaaaaaaaaaaaaaaaaaaaaaaaagcttgtacactctgaggcttgtaggagggtaaaatagagacccagtaaaattgtaataagcagtgcttgaattatttggtttcggttgttttctattanactatggtgagctcaggtgattgatactcctgatgcgagtaatacggatgtgtttaggagtgggacttctaggggatttagcggggtgatgcctgttgggggccagtgccctcctaattggggggtaggggctaggctggagtggtaaaaggctcanaaaaatcctgcgaanaaaaaaacttctgaggtaataaataggattatcc

SEQ ID NO: 2076 - DNA, 337 bp, Homo sapiens
acgccccgctgcatcttgtcccactgattgaaagactgaggacccctcagcaaattgccatcgcaagagagggggacctgctgacaaaggagcgcctctgctgcggcctgtccatgtttgaggtcatcctgacacggatccggagctttctggatgaccccatctggcgcgggcctctgcccagcaatggggtcatgcatgtggacgagtgtgtggagtttcacagactgtggagtgccatgcagtttgtctactgcattcccgtggggacacacgagttcacagtcgagcagtgctttggtgatgggctacactgggctggctgtatgatcatcgt

SEQ ID NO: 2077 - DNA, 153 bp, Homo sapiens
  misc_feature 67, 72, 86, 88, 123, 153: n = A,T,C or G
acaagctttttttttttttttttttttttttgttttttttttttttttttttttttttttttttttnaaaanttggctcaatgatntntttgccagttattttattttttctaaaaacaatanaaaaaaatcaactttaaaaagcaaaatgtn

SEQ ID NO: 2078 - DNA, 589 bp, Homo sapiens
accacctgatcaaagcatgggatattttaatagtattatacataatatttttacatagaaaactttacatagcatttcatattatataattctgcttattctttcaaaaatttatacatccattgggcaaggaatggttttcattaaattaccaatattaaatgcacttaatcattgtgtataggttaaaccaaagtaactattaactaacttttaggcattttaaggaggtaaaacatacattttacacataaatatttgatgcaaatatgcagataaaattttttaaaaattagaacactgagtaaaacacctttgatagattatattgttttgttttgagagcaaggatttccagatatgttcattctttaaaacactcagctttggtttctttgtttcccaaactgcaaagctgctgataacaaaactccaggattccatgtgagttcagctatgtctactttaacacaaatattaaaacagaattcagaaaatgcagtattaaggatccagcttctattgaaaccaatatccatttgcatcataacaacaaacatttgaatgagatggtcacacttgtacctcg

SEQ ID NO: 2079 - DNA, 309 bp, Homo sapiens
  misc_feature 36, 66, 132, 139, 169, 241, 246, 255: n = A,T,C or G
acaagctttttttttttttttttttttttttttttngagttttaaaattctttatttaaaaatctntaactgtaatgtttcataaaaaatatacacgtttctatttacatattccattaattctattagttngaattanattttaagtccaattttgaaaagcttgcanaatttcttctgaaattacttaaaattactgtatgcataaacttacaaaaacatatgctataccaaggcaganaaaanaaaaaaagngaagtggctacaaaggtccctggggcatcacctgctcacctaggaaccaggagt

SEQ ID NO: 2080 - DNA, 235 bp, Homo sapiens
actctctgagcccaatatacagagaaaggaggaaaaaagctagaattctatgcactactacacaggggcctagcaccctccagcttccagcagagcgaagggagcaggtttttcttttttcccacagagctcggtggtgttgattccatacagtttttgttcagacaggaagggataaaaatgaacttcgaacagaaaggggtagagactcttttcccattgtattctgctcaag

SEQ ID NO: 2081 - DNA, 565 bp, Homo sapiens
acaatattttaagcattactcttgtaagattttgaaaactacattttaacatggaactctagggatagtcaccttttaaatcctgttgaaaagccatgtttaagatttaatttgccaaaataatgtcttgttaatattctttcaataacgaagttgggcaatataaccaatgtttaaaaaagtttaaaatgtataagttgaggcatttgggtggtaagagaatgttatagtgaattatcccttttcttgactattggaggaccaaaaaaataaggtgtattgcgtcttagcagtgatttttatccaatcttgtttccaaaaaccatgtctcccagggccttaaaagccatcatgtaaattaccagtaaagtgtaacatatgcaaacataacaaaatcacttccatagtgacgatactccaaccatatggatattagtcatagaagaactagaggttttatgatatttttttaagtctttttttttttgtctaggtagtcagtctgcacttaaatatcaatcattttccttttttgcttcttcccttaaatttatatgtatccagt

SEQ ID NO: 2082 - DNA, 328 bp, Homo sapiens
accgcggccgttaaacatgtgtcactgggcaggcggtgcctctaatactggtgatgctagaggtgatgtttttggtaaacaggcggggtaagatttgccgagttccttttactttttttaacctttccttatgagcatgcctgtgttgggttgacagtgagggtaataatgacttgttggttgattgtagatattgggcagttaattgtcagttcagtgttttaatttgacgcaggcttatgcggaggagaatgttttcatgttacttatactaacattagttcttctatagggtgatagattggtccaattgggtgtgaggagttca

SEQ ID NO: 2083 - DNA, 266 bp, Homo sapiens
actttttaaaatgattaatgttgagttctcaactagctctgcagaactagaggagctgtttgcatctgtctgtgcggatggagtttcttttatctgacaccaggtctccaaccacactgaaacaaggcatttatctacagagctcaactagaaccccttttcattaggctactccacttccttcccctcatacctaccccacatcagccacgtggttaagaaggatagtcaggaatgtttttaccaactccaagccctaattcata

SEQ ID NO: 2084 - DNA, 509 bp, Homo sapiens
gcatttaggctttgatgagagggcacagtttgagttaggtttacctccccctttctgtgcctgggaactgtttggtccagctttagaactgtggttttgacttccttatctcttgggagaagcttctgttttaaggaatttctcttccttcttctcctgcctctagcctctcctggaaaggcctggatatggtttctaaaatctcagctgagaacttcagaaaacagcagcagtattttccttttcctagtgctaaaatccctttccctagaaattggctcaccttgggaaacccagggaaagaatcagcaggttctctgccctccctaggggttggggaaggacccaccccggtcagcacagtgccttttcctctcctgctctgagccagggtggggcattccctctagattcaggtttgggcaggggtcctatagtccctgccatggggctgcttccctgtcccttccctcccctttgctggcctactctggcataattcaagtgtc

SEQ ID NO: 2085 - DNA, 303 bp, Homo sapiens
acttcagctgacagagagattcagagaacgttaatggagttactgaatcaaatggatggatttgatactctgcatagagttaaaatgatcatggctacaaacagaccagatacactggatcctgctttgctgcgtccaggaagattagatagaaaaatacatattgatttgccaaatgaacaagcaagattagacatactgaaaatccatgcaggtcccattacaaagcatggtgaaatagattatgaagcaattgtgaagctttcggatggctttaatggagcagatctgagaaatgtttgt

SEQ ID NO: 2086 - DNA, 453 bp, Homo sapiens
actttgacgtggagaggaactcctgcaataacttcatctatggaggctgccggggcaataagaacagctaccgctctgaggaggcctgcatgctccgctgcttccgccagcaggagaatcctcccctgccccttggctcaaaggtggtggttctggcggggctgttcgtgatggtgttgatcctcttcctgggagcctccatggtctacctgatccgggtggcacggaggaaccaggagcgtgccctgcgcaccgtctggagctccggagatgacaaggagcagctggtgaagaacacatatgtcctgtgaccgccctgtcgccaagaggactggggaagggaggggagactatgtgtgagctttttttaaatagagggattgactcggatttgagtgatcattagggctgaggtctgtttctctgggaggtaggacggctgcttcctggtct

SEQ ID NO: 2087 - DNA, 475 bp, Homo sapiens
ggcaaccagggtgggggctacggaggtggttatgacaactatggaggaggaaattatggaagtggaaattacaatgattttggaaattataaccagcaaccttctaactacggtccaatgaagagtggaaactttggtggtagcaggaacatggggggaccatatggtggaggaaactatggtccaggaggcagtggaggaagtgggggttatggtgggaggagccgatactgagcttcttcctatttgccatgggcttcactgtataaataggagaggatgagagcccagaggtaacagaacagcttcaggttatcgaaataacaatgttaaggaaactcttatctcagtcatgcataaatatgcagtgatatggcagaagacaccagagcagatgcagagagccattttgtgaatggattggattatttaataacattaccttactgtggaggaaggattgttaaaaaatgcc

SEQ ID NO: 2088 - DNA, 470 bp, Homo sapiens
accaacacagccaaagactgtaagaaggtagctgaagtcctctgccaaataggattgaaaagctaaaatctttctctgtttctttcttaagtaacaactggtctattcaagctcaaccagagcatataagagaaaaaactgactaacgagggggtcttaaagagctttgaaggacagtttctagaaagtagaaagatcactgagtaaattactgcacctcctctaccccacaaaaaaaagggtgaggatgaatgtaaaagtgtagagcaagctttcagacaacttcaagtttgtttttggcgcttccgtttgtaagcaatcaagatggtgagagacgctatcccaaagaagaaagtctgtaggaaccagagtagctgagcccgaccacttgtgatgcctttatgctcgcacaatactatggcatacaaggactctcccacatgaatcagccaggcaagccaatacccatt

SEQ ID NO: 2089 - DNA, 529 bp, Homo sapiens
  misc_feature 25, 56, 63, 171, 232, 249, 324, 476, 482: n = A,T,C or G
ttttttttttttttttttttttttnggaatgaaaataaatgttttttattaggcanaatccanatgctcaaggcccttcataatatcccccagtttagtagttggacttagggaacaaaggaacctttaatagaaattggacagcaagaaagcgagcttagtgatacttgngggccagggcattagccacaccagccaccactttctgataggcagcctgcactggtggggngaattctttgccaaagngatgggccagcacacagaccagcacgttgcccaggagcctgaagttctcaggatccacgtgcagcttgtcacagngcagctcactcagtgtggcaaaggtgcccttgaggttgtccaggtgagccaggccatcactaaaggcgccgagcactttcttgccatgagccctcaccttagggttgcccataacagcatcaggagtggacagatccccaaaggactcaaanaacctntgggtccaagggtagaccaccagcagcctgcccagggccacaccacc

SEQ ID NO: 2090 - DNA, 392 bp, Homo sapiens
acattagataatactaatgaaacacaggtagagttctagcatatgcagatcaatgatcagtcaaatcatcttctccaagaacgagattcattgtcctcttcttcttcatcatcatcttgaagtaatgagtcatccaccaaagactcttcctgaaactttaggttaaaatgtatttaggaatttacccaaaaaaaaaaaaaagaaaagaaaaaaaaggtgacacttttaaatactcatctctctcaacagagttgaatacaaaaggtatttttatagctagaacattcacaaaacaaagaaaagcaacatttaaccactcaatggtttctctatatgatctattctattgcttgcatgaaacacactaaacaaatatcaaataaagcctttgt

SEQ ID NO: 2091 - DNA, 360 bp, Homo sapiens
acggccagggctattggttgaatgagtaggctgatggtttcgataataactagtatggggataaggggtgtaggtgtgccttgtggtaagaagtgggctagggcatttttaatcttagagcgaaagcctataatcactgcgcccgctcataaggggatggccatggctaggtttatagatagttgggtggttggtgtaaatgagtgaggcaggagtccgaggaggttagttgtggcaataaaaatgattaaggatactagtataagagatcaggttcgtcctttagtgttgtgtatggttatcatttgttttgaggttagtttgattagtcattgttgggtggtgattagtcggttgttg

SEQ ID NO: 2092 - DNA, 169 bp, Homo sapiens
ggcgctttggctaagctggtggaagctatcaggaccaattacaatgacagatacgatgagatccgccgtcactggggtggcaatgtcctgggtcctaagtctgtggctcgtatcgccaagctcgaaaaggcaaaggctaaagaacttgccactaaactgggttaaatgt

SEQ ID NO: 2093 - DNA, 365 bp, Homo sapiens
acttggagtattggggtctgaccccaaacaccttccagctcctgtaacatactggcctggactgttttctctcggctccccatgtgtcctggttcccgtttctccacctagactgtaaacctctcgagggcagggaccacaccctgtacatagctgtttgaaatgctagaatgacttctgacattccaagtttttcacaaaatatattttatctgtgattagccatttgactaataatactggctaacagatgttgaaaaaaattgtctgtttgttttctcattaattttggtctaaaacatgtttgcacttgtctttgacttgtgttttattaacattgattggcatattaaaagtcactctga

SEQ ID NO: 2094 - DNA, 454 bp, Homo sapiens
cttcttcaggagagggcctgtgggcttgcttttggaaggcctcaggcagacacgtgccctctgggtgatgtctgtctgctgccaggatggagcagaggagcgccacacatggaggaaagcccctgtaacgttacctaccttaaactccactcatcaaatctgagaaaagtatccactggtccccagggtttcagtcatgcttttgggggtcattgggtattagagaagtaagtatcttttctgagagagggggagtcaccccccctactggggattcctctgggctttatccactcccagccctggccctgacctttgtgggcctccctaatgcccagggcatggatggcttcagaggagtttttgaatcgaagcccagggtccttgttgatgtttcttctccgagccacacttggaggaaagttgcaggtgggttgggcagggagcaggcatg

SEQ ID NO: 2095 - DNA, 147 bp, Homo sapiens
  misc_feature 70, 84, 86, 93, 97, 132, 133, 142, 143: n = A,T,C or G
acaagctttttttttttttttttttttttttttttttttctttttttttttttttttttttttttttttngggaaaaaaccccntntttttgntttncaatgaacaaaatttacaaaaaggggtgggggggnnttggaactnntccc

SEQ ID NO: 2096 - DNA, 238 bp, Homo sapiens
actggcggcttcctgatccagcaacattagcaatttattgtatctagaaaatgaatctctggatgcagagtttacagaaatcggcatccacagaaaagtcagggaggacttaacatgggctatgccacttaaggagaacagaatttgccaaagaaaatgatgtttcgagttttgttgtgcctgatgatgtaaataaagggatggtcagcattcaattcatccttgtgctgcaggatcc

SEQ ID NO: 2097 - DNA, 554 bp, Homo sapiens
acaaggtccacaaaaggaggaggctcaaaagattggacactttaccctgacattcagcacattcattttatctttcgataaagataaccagaaatcatttgcctcttgtttattatcatgttgaaaacacaacagtatagttccttttgtcccttacattggaaaaggtattttaaatttagccttgccgtattatttatagttaggaatttactacattttggtagtctgttttgaaactaagcacttgtgtctgaaagatgcagataatatctatctatttattacacagtgggctctgtttgctgcagaaaagagtgaaacttttaactgcttagcacacttaccagtgaaatatacctgacagagcagaggttataactttggctctaattacttttagtaatggtaagacaacgtgagttttgtttgtttacatgctgtttacaatggcataattttaaaaatatatacaattgagatatttattgcctactattttaaagatgttttatgtgttttcacctttggaatatattgttacatttccttgt

SEQ ID NO: 2098 - DNA, 349 bp, Homo sapiens
accgcggccgttaaacatgtgtcactgggcaggcggtgcctctaatactggtgatgctagaggtgatgtttttggtaaacaggcggggtaagatttgccgagttccttttactttttttaacctttccttatgagcatgcctgtgttgggttgacagtgagggtaataatgacttgttggttgattgtagatattgggctgttaattgtcagttcagtgttttaatctgacgcaggcttatgcggaggagaatgttttcatgttacttatactaacattagttcttctatagggtgatagattggtccaattgggtatgaggagttcagttatatgtttgggatttttt

SEQ ID NO: 2099 - DNA, 532 bp, Homo sapiens
acaataaatataaggaagctaaaacaccaatgtggaattcctgtttccagataacatgtatattcttctatagagtgacaggatcaattgcataagcgcaaagccttaaattgctggtttagagaagacccttttttcattcagattctttgttcgtagagcagttatttgaaaaacagttatggaacacaaaacattttatagatttaatatcataacattgcaaatttttcttgtattattgttcacaccactggttatacttttttttttccttttttattgattgggcctgaatacaggctttctagagatctttttcattaatacttttaaatacctttcaggtagttacatcatgtttcttcattggatttgtaaaacttgaagccataaaaatattagtttggggtgtattggggaaaatagctaaaagtctaatttttacccatttagactttgttatttccttgtataaagtgacaaatcggggctcttgtatcagtgccagctgtaatgtttttaatgcagt

SEQ ID NO: 2100 - DNA, 368 bp, Homo sapiens
ggagaggccctctaaagataaggaaaaagaaaagactcaaatgatcacaattaacagagatctgttaatggcttttgtttattttgatcaaagtcattgtggttaccttcttgaaaaggatttggaagaaatactttatactcttggactacatctttctcgggctcaggtaaagaagcttcttaataaagtagtgctccgtgaatcttgcttttaccggaaattaacagacacctcaaaagatgaagagaaccatgaagagtctgagtcattgcaggaagatatgctaggaaacagattattacttccaacaccaacagtaaagcaggaatcaaaggatgtggaagaaaatgttggcctcattgtgt

SEQ ID NO: 2101 - DNA, 407 bp, Homo sapiens
acagttatttgtcaagcttagctttgatttcaaaggacacgcttaccttgtctggcataagaattaatgctcatgtctgcagtggttgggtaggtcctgcttaggagaattaaaaaattcctctttccgtttggttgaatgttgcagtcaggaaccccaactcacttggaatgtttttatatgtaatcatttcccttgaagcttatactttataagggaagaaagaattcaggtgatatgggaaaactgcttggcagaccttcatcttctgcctcaactgtaaaccacatgtaagtgcttaatggagactgttttcattcttgtgatatttaacattcagaaaattacttcagctttggaaatactcaggctgtttttattctgcaggtaagtgttttgacttaagt

SEQ ID NO: 2102 - DNA, 272 bp, Homo sapiens
acacagacagggaaactggcaagctgaagggagaggcaacggtctcttttgatgacccaccttcagctaaagcagctattgactggtttgatggtaaagaattctccggaaatcctatcaaggtctcatttgctactcgccgggcagactttaatcggggtggtggcaatggtcgtggaggccgagggcgaggaggacccatgggccgtggaggctatggaggtggtggcagtggtggtggtggccgaggaggatttcccagtggaggtggt

SEQ ID NO: 2103 - DNA, 560 bp, Homo sapiens
acctacattctttcaactaagaggatagaaaattgttttctgaattgttgttatcacaaaatggtatctatcattttaaaattatgatttgaaaaataaaaattccctaaaaatttttaagttttttagagttttcctcagaatgtagattctagctaagcattaaagtttaaaaaatgtctatctgaaatctctgaatcattctaaaatgagaaaacaatgtagcttaccaatgttaggctttttatttcaaccttggttttaacagaaatctggtgacactttaattacatatttgcatcatcccttctatcacaagaaatatacaaattataatgtgaaagacaacagtgactggaagtcaaactacagcaggctacctagaacatccctaaatgttgtaaattatatccgtccacccagaatcacaataatcacttatgctgtagttcctgccatatccatttatttgcattagaaaaaaaattcacattcctctctgaaaactgataagctttataaagtggagttgagaaatctagacaaaagcagtctgttgt

SEQ ID NO: 2104 - DNA, 444 bp, Homo sapiens
acaataaaagaagcatctgcaacttaagcctcccacagtcctaagcctgatatgcgcaaagcaaagcctctttcccgcaaactaaattccatccatttgagctttcagagatcgatgcccaagagctatcattaatatatacagcatattgactctagttgcatcaattatgcctgaagagtttaatacccatccaagtccaaaggtggaagaatacatacactggtatggtaataggcaagagcaggctgtaaaagcaaaggctggctgtgctagtgcagccctgtgggaagttttcttccacagaggctgagtagaacagtcctgctaaagaaaccagtggaataagaacagtcaacgtaggaagagacagaaacattcttctcttccacttattacctgccactgtgttttaaaaggtatatggtattaagaaaagttggc

SEQ ID NO: 2105 - DNA, 526 bp, Homo sapiens
  misc_feature 198, 227, 264, 267, 280, 359, 398, 494: n = A,T,C or G
acaagcttttttttttttttttttttttttttttaggaatccaaacattcagtttattaaactaaggctagtgaagccatagcatgaaaaaaagctgcagtcattcgggacaagtggatgattttataaagctaaaatcaaaagacttaggacatggaaaaattcataagtatgaagtaataaaacacaaaagtgacncaagaattacaaatatatttaaatctcanacctgggaaatggactatacacagccttctggggganaanagaaatgccttanatgttctgacagcactgcacctttggcttgttttcagtggttggtggaacatgaataggaaccacattgttgcttgganacatgtcattttcgcgtctgtctgacatttgcttctganaaacaatgcggtaaatctctgttaaaattgtctgaaaagcagcttctacatttgtagagtctagggccgaagtttcaatgaatgacaaaccattcnttttctgcaaaagctcttgcttcatctgtagg

SEQ ID NO: 2106 - DNA, 368 bp, Homo sapiens
actctgaggcttgtaggagggtaaaatagagacccagtaaaattgtaataagcagtgcttgaattatttggtttcggttgttttctattagactatggtgagctcaggtgattgatactcctgatgcgagtaatacggatgtgtttaggagtgggacttctaggggatttagcggggtgatgcctgttgggggccagtgccctcctaattggggggtaggggctaggctggagtggtaaaaggctcagaaaaatcctgcgaagaaaaaaacttctgaggtaataaataggattatcccgtatcgaaggcctttttggacaggtggtgtgtggtggccttggtatgtgctttctcgtgttacatcgcgc

SEQ ID NO: 2107 - DNA, 344 bp, Homo sapiens
  misc_feature 50, 82, 111, 136, 162, 238, 261, 286, 325: n = A,T,C or G
acaagcttttttttttttttttttttttttttttttttttacaaaccatntgcaagtttatttaaataagttaacactgcanagtgagtcaatttataagtataaaaatanatggtttaaaaaccaaaaataagcnccacacaaaagcagattatacatacnccatcaggcctttggaatattaaggcaacataaatatctcaagcaattttaaaaaaatgctttacttatataacanatgttattaaaacatctcaaaanaggcagggctcacaatttttttcantatgagggtcttcccttccatttttgttaatatattaangattcttcttaaatactgg

SEQ ID NO: 2108 - DNA, 129 bp, Homo sapiens
accccagccacactgtttgcggtcatgtttgctatgtatataatctcaggactgactggcttcattggcctaaactctatagctgtcttgtgtaaccttgtcatggggttagcactgatatttctttgt

SEQ ID NO: 2109 - DNA, 264 bp, Homo sapiens
accacatccaggacaaaggccgctttgaactctaccgtgccacgttttatgccgctgagataatgtgtggactgcagtttctacacagcaagggcatcatttacagggacctcaaactggacaatgtgctgttggaccgggatggccacatcaagattgccgactttgggatgtgcaaagagaacatattcggggagagccgggccagcaccttctgcggcacccctgactatatcgcccctgagatcctacagggcctgaagt

SEQ ID NO: 2110 - DNA, 308 bp, Homo sapiens
ctaaaagctcctactgtgatgtgaaatgctcatactttataagtaattctatgcaaaatcatagccaaaactagtatagaaaataatacgaaactttaaaaagcattggagtgtcagtatgttgaatcagtagtttcactttaactgtaaacaatttcttaggacaccatttgggctagtttctgtgtaagtgtaaatactacaaaaacttatttatactgttcttatgtcatttgttatattcatagatttatatgatgatatgacatctggctaaaaagaaattattgcaaaactaaccactatgt

SEQ ID NO: 2111 - DNA, 527 bp, Homo sapiens
gtcgctttggggccctctgtagctcaagaactagaggagctgtccaaaatggcaggaggtttacagacatatgcttcagatcaagttcagaacaatggcctcattgatgcttttggggccctttcatcaggaaatggagctgtctctcagcgctccatccagcttgagagtaagggattaaccctccagaacagccagtggatgaatggcacagtgatcgtggacagcaccgtgggaaaggacactttgtttcttatcacctggacaatgcagcctccccaaatccttctctgggatcccagtggacagaagcaaggtggctttgtagtggacaaaaacaccaaaatggcctacctccaaatcccaggcattgctaaggttggcacttggaaatacagtctgcaagcaagctcacaaaccttgaccctgactgtcgcgtcccgtgcgtccaatgctaccctgcctccaattacagtgacttccaaaacgaacaaggacaccagcaaattccccagccctctggtagt

SEQ ID NO: 2112 - DNA, 224 bp, Homo sapiens
actttccggagttgtggtgtcgtttgtgagatgcttgagggtttcattctctgatacacacaagtccaaatcattgaaccgtagcagaaaagtattccaatcctctgccatttctggggatttaatctccttgattttgaagaagtagcccagggtcaggaaagctatggccatggcgcttacgctgatcatgaagaccaccaggggaggccgactgctgatgt

SEQ ID NO: 2113 - DNA, 441 bp, Homo sapiens
ggggaagcaagcaccttcttcacaaggtggcaagagagagtgcaggggaaatgctaggcacttatcaatcagccaaatctcatgagaattcactatcatgagaacaagggggaaatctgctcccatgatctaatcacctcccaccacgaccctccctcaacacctggggattactattggagatttgggtggggacacaagagccaaaccatatcactgctgttgtgggtaataggggaggtgaaattggggggacaattcggcctctttgtgtccagaggttgtgcagttatcgagtgaggtcgatcagaagtctaaagggatctttcaaatggatagtgagttgccttttcctataggtgacaatcagagatttaatgttttaagtatcatataataggtttttctcctgattgtgaattgtaagtgttggtaatacag

SEQ ID NO: 2114 - DNA, 520 bp, Homo sapiens
acatgacaaggtgcggctccctaggcccctcccctcttcaaggggtctacatggcaactgtgaggaggggagattcagtgtggtgggggactgagtgtggcagggactccccagcagtgagggtctctctcttcctcttgtgctcttgctggggctggtggtccaggggtcttactccttggaggccatgtgggccatgaggtccaccaccctgttgctgtagccaaattcgttgtcataccaggaaatgagcttgacaaagtggtcgttgagggcaatgccagccccagcgtcaaaggtggaggagtgggtgtcgctgttgaagtcagaggagaccacctggtgctcagtgtagcccaggatgcccttgagggggccctccgacgcctgcttcaccaccttcttgatgtcatcatatttggcaggtttttctagacggcaggtcaggtccaccactgacacgttggcagtggggacacggaaggccatgccagtgagcttcccgttcagctcagggatg

SEQ ID NO: 2115 - DNA, 518 bp, Homo sapiens
acattcacagttccgaatatccgccaactctaagtcgccacgaagagaaaagagaatcaggaggaacaaacatccattcaaagtctgtttatcagagatttttttttctgaaaatgcacagtggcatttcattcaaaaaacccttcatctgcagacctgcggaagggaggtggcctgggtcccttccctcggaatatcttagtttatttacctccttcattggccatttgcaggctcttctccttgaaaaatgaatctttacgcattctccaattataaaatcagtgactgttagctaccaaaggctgcactaggatttcttctgtgtccaacacgccaagagccctgaaattgacttcggtttactccatccctgtctgtcctgctggcagtgtccatgctaaaaaacaagtcgaggtgattgattgaaacggagctgaaggttgtttttaaatgtctgtcagtggagaaacgcgtatcacgaatctctgaggaagttagtaaacattttttcccgt

SEQ ID NO: 2116 - DNA, 519 bp, Homo sapiens
acaagtttgggacccactctggaacctgaggaagtggtaaacaggctgatgcatgggattctgactgagcagaagatgatttttattccatcttctatagcttttttaacaacattggaaaggatccttcctgagcgtttcctggcagttttaaaacgaaaaatcagtgttaagtttgatgcagttattggatataaaatgaaagcgcaataagcacctagttttctgaaaactgatttaccaggtttaggtcgatgtcatctaatagtgccagaattttaatgtttgaacttctgttttttctaattatccccatttcttcaatatcatttttgaggctttggcagtcttcatttactaccacttgttctttagccaaaagctgattacatatgatataaacagagaaatacctttagaggtgactttaaggaaaatgaagaaaaagaaccaaaatgactttattaaaataatttccaagattatttgtggctcacctgaaggctttgcaaaatttgc

SEQ ID NO: 2117 - DNA, 184 bp, Homo sapiens; identical to SEQ ID NO: 1935

SEQ ID NO: 2118 - DNA, 331 bp, Homo sapiens
acggccagggctattggttgaatgagtaggctgatggtttcgataataactagtatggggataaggggtgtaggtgtgccttgtggtaagaagtgggctagggcatttttaatcttagagcgaaagcctataatcactgcgcccgctcataaggggatggccatggctaggtttatagatagttgggtggttggtgtaaatgagtgaggcaggagtccgaggaggttagttgtggcaataaaaatgattaaggatactagtataagagatcaggttcgtcctttagtgttgtgtatggttatcatttgttttgaggttagtttgattagtc

SEQ ID NO: 2119 - DNA, 450 bp, Homo sapiens
actcaatcggatgcctggcttaagcaatcaaaagaatggagttgccatccagtgacagggagaagcctgtggtttttgttgttgcagttagggagagacttggggagaaatttgtgggtaagttttaggcaaattgagttcaaaatgtctattttgatgtcaagtggacagctgaatataaaagactaccattcagaggaaaggagagggaaagccaggaaacgggtatggatgtcgaggattttgctggtaacgaaacaaagttccagaggaaatagtggcaatctttcaggagttggaaagggaaagagaagggtcattacaggagacacacaaaactatgaacctaagaatgcaagagatgaagactcacattggtttactgactgatataaaccacaataatatgcacagtgagacaggattcagcagagacagtgagaccagagt

SEQ ID NO: 2120 - DNA, 239 bp, Homo sapiens
accaggtccccagctcagccctaggctgtgctcacttcagggtcaccctgcccaaccttagaggaggtgaggggactccaaagtttttgatgatgcccccactcggtgaggccccttcaaagtgccatctgtttacttctcaaatgaaaaagaattcaggtctgagtgtccaggaaagggggtgaatttcataaccgcctgtgacagcgatgggaaggagccacacccctccagagggt

SEQ ID NO: 2121 - DNA, 241 bp, Homo sapiens
  misc_feature 70, 72, 87, 100, 102, 121, 127, 138, 139: n = A,T,C or G
tacaagcttttttttttttttttttttttttttctttttttttttttttttttttttttttttttttttnanaaaaaaatggggttnttaaacccaaaancngggtcaaaaggaaaaacancaaaancggggagtaanngcccaggcccctgccccaaaccctttggggaaaaaaaaaacaggggtggggcaggaaaaaaaccccaacagggaggaaaaaaaggggattgggtcccggttt

SEQ ID NO: 2122 - DNA, 381 bp, Homo sapiens
acaaagtgtcctacaaggggccaggaccaggcatcaagttcagtgcagaggccctgcgctgccacctccgggaccatgtgaatgtatccatggtagaggtcacagattttcccttcaatacctctgaatgggagggttatctgcccaaggagagcattaggaccaaggctgggccttggggcaggtgtgctgttgtgtcgtcagcgggatctctgaagtcctcccaactaggcagagaaatcgatgatcatgacgcagtcctgaggtttaatggggcacccacagccaacttccaacaagatgtgggcacaaaaactaccattcgcctgatgaactctcagttggttaccacagagaagcgcttcctcaaagacagtttgt

SEQ ID NO: 2123 - DNA, 251 bp, Homo sapiens
cggccacaggcaggtcacagaaaggcaggtttcatttcttatcacataagagagatgagaaagcttttattcctttgaatattttttgaaggtttcagatgaggtcaacacaggtagcacagattttgaatctgtgtgcatatttgttactttacttttgctgtttatacttgagaccaacttttcaatgtgattcttctaaagcactggtttcaagaatatggaggctggaaggaaataaacattacggt

SEQ ID NO: 2124 - DNA, 544 bp, Homo sapiens
gttcaggacctcttcccattgaagctataatttatttggaccaaggaagccctgaaatgaattcaacaattaatattcatcgcacttcttctgtggaaggactttgtgaaggaattggtgctggattagtggatgttgctatctgggttggcacttgttcagattacccaaaaggagatgcttctactggatggaattcagtttctcgcatcattattgaagaactaccaaaataaatgctttaattttcatttgctacctcttttttattatgccttggaatggttcacttaaatgacattttaaataagtttatgtatacatctgaatgaaaagcaaagctaaatatgtttacagaccaaagtgtgatttcacactgtttttaaatctagcattattcattttgcttcaatcaaaagtggtttcaatattttttttagttggttagaatactttcttcatagtcacattctctcaacctataatttggaatattgttgtggtcttttgttttttctcttagtatagcatttttaaaaaaata

SEQ ID NO: 2125 - DNA, 163 bp, Homo sapiens
ataaactcaaaaagtcattgggaaacttaaagtctattctacttttgcaagaggagaaatgtgttttatgaacgatagatcacatcagaactcctgtggggaggaaaccttataaattaaacacatggcccccttagagaccacaggcgatgtctgtctccat

SEQ ID NO: 2126 - DNA, 482 bp, Homo sapiens
ccgccactgtccggccacagcctaacgctcttcgctgtcgtttgcggtctcgcgcagggcggccccggttctggtgtttggcgtcggaattaaacaaccaccatgtcgagcaaaaaggcaaagaccaagaccaccaagaagcgccctcagcgtgcaacatccaatgtgtttgccatgtttgaccagtcacagattcaggagttcaaagaggccttcaacatgattgatcagaacagagatggtttcatcgacaaggaagatttgcatgatatgcttgcttcattggggaagaatccaactgatgagtatctagatgccatgatgaatgaggctccaggccccatcaatttcaccacgttcctcaccatgtttggtgagaagttaaatggcacagatcctgaagatgtcatcagaaatgcctttgcttgctttgatgaagaagcaactggcaccatacaggaagattacttgagagagctgct

SEQ ID NO: 2127 - DNA, 264 bp, Homo sapiens
cgctccggctgcaccgcgctcgctccgagtttcaggctcgtgctaagctagcgccgtcgtcgtctcccttcagtcgccatcatgattatctaccgggacctcatcagccacgatgagatgttctccgacatctacaagatccgggagatcgcggacgggttgtgcctggaggtggaggggaagatggtcagtaggacagaaggtaacattgatgactcgctcattggtggaaatgcctccgctgaaggccccgagggcgaaggt

SEQ ID NO: 2128 - DNA, 610 bp, Homo sapiens
agcgtggtcgcgccgaggtactaagtggcacagactcagaactgcatatacctcgagtatgtgaattctgtcaagcagttttcccaccatccattacatccaggggggatttccttcggcatcttaattcacacttcaatggagagacttaagacacatttgaaaacagacatatcaagttctatgtgatgattttgggtttttaatactataaatacttgattgtaaactaaattcaagatcatttataggaaaatctagtttcacagctatttgaatttttttctggatttactatataactcttattttttaaaagatcattctgttctttcaaggagaaataagcctaaaagaagaaaaacaaaaaaaattctgtataaaactgtaatcctttgtattcatgtttacagtgctattactataattcaaaattatgtatgtgacttagagttatataatcataatttatgtttatttcaaatatctaagtttattgcttggatttctagtgagagctgttgaatttggtgatgtcaaatgtttctagggtttttttagtttgtttttattgaaaaatttaattatttatgctataggtgatattctc

SEQ ID NO: 2129 - DNA, 212 bp, Homo sapiens
accgcggccgttaaacatgtgtcactgggcaggcggtgcctctaatactggtgatgctagaggtgatgtttttggtaaacaggcggggtaagatttgccgagttccttttactttttttaacctttccttatgagcatgcctgtgttgggttgacagtgagggtaataatgacttgttggttgattgtagatattgggctgttaattgtcag

SEQ ID NO: 2130 - DNA, 358 bp, Homo sapiens
actgataagtcctagtaacactgattcatacattatctagtcttacattttgtaaataaaagttcttcagccttatggaaataaattagaaggtatgttctcaaaatggtattaagtatattttgaaagacttccaaaaatctttgacaattatatattatacattctcagaaaaaagtatatatctatgtatctatatatatcactatagttctatttactgctttccaagtagctttttcaaataaaatctaaaagtcattattattacaaattctaataccaaaaaatctcataacttatcctatttacaagttagtgagagtattatctacacaaaattccttaaataaaaagt

SEQ ID NO: 2131 - DNA, 75 bp, Homo sapiens
acaatatctaaaaagaaagtgacatgaaggaagcaatctacaacttccttccgcttagcgagcatgcatgtgtgt

SEQ ID NO: 2132 - DNA, 509 bp, Homo sapiens
acacaatggtttattaaaggaatgtatggcccacatcaacctagcaaggattctactggtaaaccttcctatggccaaaggaaaaacaagcaggagttgagtggctggggtggggtgcaggcaatggagagagggcagaagggtgtagaagctgaaggggtctagaagcttactcctgagtttcttccttctgtcttcaaatctttacttcttatggccaaagacccagctgtttcataggctggagatgcactcttctagactgctcgagacagccagagacaggggaggagggaagaaggatactgtggaaagggatggcggggcaaacatttagagctagaagccactactgggccaatgctaaagtttctgtctctaagcctaaaaaagccagtgtagtagggcccttatcactcttagtttgctaggtttcccctctgaaataatgagcagatttagccaggctagcagaaaggaagaggacggggctgtgcaggagttagcag

SEQ ID NO: 2133 - DNA, 360 bp, Homo sapiens
ttttgatttgagttaaccccaaatataaaattacctgtagtgatgtctctctcccagcccttatatgtggatattttttaagtggacttgtatgctgataattctagaccaaagtaaatatggcagaatatttatacatgaaaaaataattttgcaaatattttctataattgtattcatttaaaatgttgatagcttgtgttagtttcagggaggggtgtatattttgataaaaaatacttgactttgtaattctgtatattctatacaatttatagcagagccgttttaagacagccttgtcacattttttgttaattgtgaaaattttattgagtgatgtttaagtatgcattgagt

SEQ ID NO: 2134 - DNA, 576 bp, Homo sapiens
acatcattggcaaaattttaactttaattatggtcaatgtagccaattatttgtttcaacagttgcagaacagatatttcatttactgccttcacagattagaaattcaaaagtaatttaagactactatgttggcttaaaattatcaggataaacaaatacttctaacaggatagtaaaaacaagtaaaattttatttctcataaactaattcctcaaaagatgtcctacatttagcaactgttttctaggacatgtttactagaactactttaagtatgctgtgctttcttttcaagtgaggtatctatattgaggaaaaaaatcttataaattccttttacattaaactaatttaatacactattttgttttctgggctgaatttttaaatttttttcttacatttgatcactttctaattcaaaaattgtagcactacataggacatttaattctattactaaataggctccaaattacattatacagtttagaaaccatttcaatgaatggatttacaaaaaaaaaaaaaactgtccttttaaatgaaatgcaatataaaatactaataca

SEQ ID NO: 2135 - DNA, 537 bp, Homo sapiens
  misc_feature 523: n = A,T,C or G
actattgacccagcgatgggggcttcgacatgggctttagggagtcataagtggagtccgtaaagaggtatctttactataaaagctattgtgtaagctagtcatattaagttgttggctcaggagtttgatagttcttgggcagtgagagtgagtagtagaatgtttagtgagcctagggtgttgtgagtgtaaattagtgcgatgagtatagggctgtgactagtatgttgagtcctgtaagtaggagagtgatatttgatcaggagaacgtggttactagcacagagagttctcccagtaggttaatagtggggggtaaggcgaggttagcgaggcttgctagaagtcatcaaaaagttattagtgggagtagagtttgaagtccttgagagaggattatgatgcgactgtgagtgcgttcgtagtttgagtttgctaggcagaatagtaatgaggatgtaagcccgtgggcgattatgagaatgactgcgccggtgaagcttcagggggtttggatganaatggctgttacta

SEQ ID NO: 2136 - DNA, 220 bp, Homo sapiens
acaagactcaagtaaatagaaaggcagctttcaatcacaaatcagtttttcagattttactgtggaagcatatttaatgcacacatttgaatgttacacataaataattttaacgatggagtccaagttctggattttacattagatctgcatatataagacacttgtggtcaaatttcaagattggtaaagccagtttcaagctgcttatattttgagt

SEQ ID NO: 2137 - DNA, 372 bp, Homo sapiens
atcaacaaggatttggagtagatcaatcaccttctgctgcttggatgggtggatttggtgctcagcctccccaaggacaagctcctccccctgtaatacctcctcctaaccaagccggatatggtatggcaagttaccaaacacagtgagccgggactctaaaaaaaaaattgtaattcatgataggcttcgatttcctgtgacactctgaagacatgaaagtagacatcggaaaatgaaaatatttattttaaaaattgaaatgtttggaacctttagcacagatttgctttggtgaaggacacgtgtcttctagttctgcctttttaagtttttgttcatgatggatatgaacatgatttttctttatgt

SEQ ID NO: 2138 - DNA, 276 bp, Homo sapiens
acctctcaacattaccaaaatcatttctttagagggaaggaataatcattcaaatgaactttaaaaaagcaaatttcatgcactgattaaaataggattattttaaatacaaaaggcattttatatgaattataaactgaagagcttaaagatagttacaaaatacaaaagttcaacctcttacaataagctaaacgcaatgtcatttttaaaaagaaggacttagggtgtcgttttcacatatgacaatgttgcatttatgatgcagtttcaagt

SEQ ID NO: 2139 - DNA, 370 bp, Homo sapiens
actaagctgataggcatacaggatcaaagatgctagatccaaactgtatttccttacttgcaaaaatgacctcagcttttggaacaatgaccaaaagaaaaaaaaaaaaaaaagaattagtggcagtgaatcgaaatcaaaagcaaaaaagctacattcaacaataatgctgttttcaatgcatttttaataatattagaatggcttcaagtctcttctaataaagcataataaatgaaacatttaaactctggattcagattattttttatttgaaatcctatcatgaaattaaaatatttttgactaacgacaaatttcttaaaaaatatagaaagataagcttcaatggaatgaacaaaagcacagt

SEQ ID NO: 2140 - DNA, 326 bp, Homo sapiens
accaaaaaggggagaaaaaaaatgtgtcatgcaaagaggatgtgttattttatttttttggtttggttttagagtaggttgggttgccgtggttactaggcgatggatggcagtccttggtggcagagaggttcctagcctgggagggagaaacgcagggtgtgtgtgttcccgtgcatgagaagactggattgtatctcactgatgacaggccaacggctgctttagagatggtgagagattggatcttatataaacagtgttttaaccctcttcatcctgcatgcaaacagatccagctgcctgtagcactttaagtctcaagt

SEQ ID NO: 2141 - DNA, 498 bp, Homo sapiens
  misc_feature 91, 134, 186, 200, 287, 334, 349, 361, 457, 474: n = A,T,C or G
acaagcttttttttttttttttttttttttttttgcttaaagcaacaatttactattatcttccatagctctgtgtgttgactaggctcanctgtgtggttttcattggggtcctcatacagttacagtcacanaagctggatgggacaggacatccatgatggtttctttgctcatgggtctggngcctcagttagggnggcaggaataactggggactagctgggcttctccctcagtctatgcagcttctccacatagctagctgggcatcctaacaacacggnggtctcagggcagttatgctccttacatgctggttggcttcccccanagtgagccctccacnaggtctaaaaanactgtccaaggctgcttgtaactcagcttcaaaagtcacacagcatcacttccaccaccatccaatggccaaaagcaaattatggggctagctcanattcatggaaagggcancacacaagggcatggttactggat

SEQ ID NO: 2142 - DNA, 501 bp, Homo sapiens
acacaatttaatttacgcagaagagcatcggagacatttgtctcatagatatgattgacatgagtgataggctaaaactaaaattttagtggtttgcggagtggctagaaaacatgaattgtaagcagtttttcagaatttaaaaatctcttagtttgaacagtagaagatgtaaataagcatagagactgttggcaagttatgtttatcacaaaacagagaagaaggcacagagggtccctttgacccttgaacttgtggttactaatagtattaaggttggaaatcatgaggaaggacacagaatataaactgggatcttgaagacaggcatgttgataaaagtagccctgaagccttaatattagcaacatcgaagatgggaaagacaggattgatttatttgggaactaagtttacacattatatgtctcaatataaaacaaaagctatggctttagagtttaacaggttaaaaaaaaataggaggaaaggcaaaac

SEQ ID NO: 2143 - DNA, 279 bp, Homo sapiens
  misc_feature 245, 255, 256, 273: n = A,T,C or G
actaaaagccacagtatgtggcaactgcaaaaggatcaggaatttagggtatgatctcggtcacgtgtcccgggcgctgaggggaaaggaagcgggcatgattgtagacaatgagggggttctcttgatgtaatgaaatgcaattttatggtttggtgcaaaaactcctattttccagtaaattaactttatttctaaagcatattttgatttgccatcaagagcaataaagcattaaatcctanaaaaaaaaannaaaaaaaaaaaaaaaangcttgt

SEQ ID NO: 2144 - DNA, 573 bp, Homo sapiens
acttttagtagacatggtgcttcaccatgttggccaggctggtcttgaaatcctgacttcaggtgatacgtctgcctcgacctcctaaagtgctaggtgtgagccaccgcacctggcacatttgttttcctttttaaattttatcagtggcagcctctgaatcctcaagatgtattaaaaatgtcttcctaattaatgtctccactctcttttgaggaaaatatggattcaacaataagaatgtatctttacatctgagcatttaaaaatagattaattctcccatttatactatagcaacttgtagtcaccaaaatttcccttctcttttcctcagaaatgccctcattcccaggaaattttaccccagtctgctgggagcaggaacatctctgtgcaatcctgaaagccagccttcttttgagatgccctcatcccctcaccgactcaacagccctgccttaagtgaaagcacctaggaccctcaactgtgtctcctgggctaatgcccgaaggctataatgtttaattgaagagatcttcttggatgctgagaggaataaagtcagtcag

SEQ ID NO: 2145 - DNA, 491 bp, Homo sapiens
acagaaggtatcagccaagcgcaggctcttcagaaacctagaaactaaaaagagatgcaacatgtgactggccatcagccagacatgtctagggtgagaccagtgctcagcaccacccgccaaggaacactgatgagttgtgggacattatggtcggccaagtgaggaatgattgcagggaccagagaagaccaaagatgccagatgtccccagagtttcttgagggctgggtttcacgtctttgcttgtcctttttgtccccacttgcctgcaccgtgcctgactcatccagtggggaaggtgactcaagaagttgtttaagcctaggcctaggcagtccacttcgggaggtgggggcactccacactggggggccctgcagctccagggctggtgctctagcagatccgctcaggcacggttgggtgaccgtggggtcaccgattgcgtagattatttctagggcagtgctgggttagaaatgtctgtc

SEQ ID NO: 2146 - DNA, 223 bp, Homo sapiens
accgcggccgttaaacatgtgtcactgggcaggcggtgcctctaatactggtgatgctagaggtgatgtttttggtaaacaggcggggtaagatttgccgagttccttttactttttttaacctttccttatgagcatgcctgtgttgggttgacagtgagggtaataatgacttgttggttgattgtagatattgggctgttaattgtcagttcagtgtttt

SEQ ID NO: 2147 - DNA, 542 bp, Homo sapiens
acattttgtcacggagtccacagagctgagcttttgagcagactctgagaagtatcattgcttgtgttgaaagaatacaacaggatttaagtttctctttaaaaattgcactgaagaaaggccgggcgcggtggctccccctgtaatcccagcgctttgggaggccgaggcggggggatcacgaggtcaagaggtcgagaccatcctggccaacatggtgaaaccccgtctctaataaaaatacaaaaattagccgggcatggtgacgtgcacctgtagtcccagctactagataggctgaggcaggagaattgcttgaatccgggaggcggaggttgcagtgagccgagatcgtgccactgaactccaacctaccaatagagcgagactccgtctcaaaaaaaaaaaaaaagaaagaaatagcattgaagaaaataccgcacatcagaggaaagcttattttctgcatggtgtcttttcaaagatagaatatttgaagcatgttttctagcgattgtgtgaatgagggtgagctggctgag

SEQ ID NO: 2148 - DNA, 528 bp, Homo sapiens
ggaagcctttgaaatcagcaaagagcagatgcaacccacgcatcccatccggctgggcctggccctcaacttctccgtgttctactatgagatccagaatgcacctgagcaagcctgcctcttagccaaacaagccttcgatgatgccatagctgagctggacacactaaacgaggattcctataaggactccacgctgatcatgcagttgctgcgagacaacctcaccctctggacgagcgaccagcaggatgaagaagcaggagaaggcaactgaagatccttcagatcccctggcccttccttcacccaccacccccatcatcaccgattcttccttgccacaatcactaaatatctagtgctaaacctatctgtattggcagcacagctactcagatctgcactcctgtctcttgggaagcagtttcagataaatcatgggcattgctggactgatggttgctttgagcccacaggagctccctttttgaattgtgtggagaagtgtgttctgatgaggcattt

SEQ ID NO: 2149 - DNA, 306 bp, Homo sapiens
actttgacccagccaacggcaagttcagcaagtcagccaccagccccgaagggaagaagctgccacgcaccttctgccagctgatcctggaccccatcttcaaggtgtttgatgcgatcatgaatttcaagaaagaggagacagcaaaactgatagagaaactggacatcaaactggacagcgaggacaaggacaaagaaggcaaacccctgctgaaggctgtgatgcgccgctggctgcctgccggagacgccttgttacagatgatcaccatccacctgccctcccctgtgacggcccagaagt

SEQ ID NO: 2150 - DNA, 522 bp, Homo sapiens
accagtgtcacaaatgcagatccatcaactacgatgaaaaggatcccttcctctgcaatgcctgtggcttctgtaaatatgcccgcttcgacttcatgctctatgccaagccttgctgtgcagtggatcccattgagaatgaagaagaccggaagaaggctgtatccaacatcaatacacttttggacaaagctgatcgagtgtatcatcagctgatgggacaccggccacagctggagaacctgctctgcaaagtgaatgaggcagctccagaaaagccacaggatgactcaggaacagcagggggcatcagctccacttctgccagtgtgaatcgttacatcctgcagttggctcaggagtattgtggagactgcaagaactcttttgatgaactctccaaaatcatccagaaagtctttgcttcgcgcaaagagttgttggaatatgacctacagcagagggaagcagccactaaatcatcccggacctccgtgcagcccacattcactgccagccagt

SEQ ID NO: 2151 - DNA, 373 bp, Homo sapiens
acgccaaagaagggagagaatttgattatgtgattaatgatttgacagctgttccaatctccacgtctccagaagaagattccacatgggagtttctcagactgattcttgacctctcaatgaaagtgttgaaacaggatgggaaatattttacacaggggaactgtgtcaatctgacagaagcactgtcgctctatgaagaacagctggggcgcctgtattgtcctgtggaattttcaaaggagatcgtctgtgtcccttcatacttggaattgtgggtattttacactgtttggaagaaagctaaaccctgaagatcagtagcccctaatcacatgtgctgcaaatagccttcctgacctccatatgctgt

SEQ ID NO: 2152 - DNA, 435 bp, Homo sapiens
  misc_feature 418: n = A,T,C or G
accagcacagagccgcagcggcctgtcaccttgcaagggacagtgtggggcttgccgatcttgttcccccagtagcctctgcgcacggggacgatggagagcttggccaggatgatggccccacggatggcggtggccacctgcccgggcggccgctcgggcaggtacttccagccaacctcgtgagccaggcgccccagataggcaaactttcttgtaggcttcagacgcacgaccttgggggcagcaggaaccaccatccgctttttcttgtcgtagggcggtgggatgccgtcaaacaccttgagacggtccagagcggcctggcctcgcttggttttgtggggcagcatacctcgcacggtccgccagaagatgcggctgggggcccggaagtggtaggagcctcgggaagggntggtgttcatccgcttg

SEQ ID NO: 2153 - DNA, 360 bp, Homo sapiens
acggccagggctattggttgaatgagtaggctgatggtttcgataataactagtatggggataaggggtgtaggtgtgccttgtggtaagaagtgggctagggcatttttaatcttagagcgaaagcctataatcactacgcccgctcataaggggatggccatggctaggtttatagatagttgggtggttggtgtaaatgagtgaggcaggagtccgaggaggttagttgtggcaataaaaatgattaaggatactagtataagagatcaggttcgtcctttagtgttgtgtatggttatcatttgttttgaggttagtttgattagtcattgttgggtggtgattagtcggttgttg

SEQ ID NO: 2154 - DNA, 478 bp, Homo sapiens
acaatctcctgtttctttgccatagtggctttgatttgggattatatgcacccctttccagagtccaaacccgttttggctttgtgtgtcatatcctattttgtgatgatggggattctgaccatttatacctcatataaggagaagagcatctttctcgtggcccacaggaaagatcctacaggaatggatcctgatgatatttggcagctgtcctccagtcttaaaaggtttgatgacaaatacaccttgaagctgaccttcatcagtgggagaacaaagcagcagcgggaagccgagttcacaaagtccattgctaagttttttgaccacagtgggacactggtcatggatgcatatgagcctgaaatatccaggctccatgacagtcttgccatagaaagaaaaataaagtagccaattctaaaagtagccctctttctcctggatcttgctgaattagtggcttggggggtgg

SEQ ID NO: 2155 - DNA, 354 bp, Homo sapiens
accgcgccattgccgactacgagaagacctcgggctccgagatggctctgtccacgggggacgtggtggaggtcgtggagaagagcgagagcggttggtggttctgtcagatgaaagcaaagcgaggctggatcccagcatccttcctcgagcccctggacagtcctgacgagacggaagaccctgagcccaactatgcaggtgagccatacgtcgccatcaaggcctacactgctgtggagggggacgaggtgtccctgctcgagggtgaagctgttgaggtcattcacaagctcctggacggctggtgggtcatcaggaaagacgacgtcacaggctactttccgtccatgt

SEQ ID NO: 2156 - DNA, 527 bp, Homo sapiens
acttccatagcaatcctatgtgaggagtttccccacgagccaggagactttgtgatcctactcaatgcagggatgagcactcgacaagccttgctattcaacttcctttctgcatgttcctgctatgttgggctagcttttggcattttggtgggcaacaatttcgctccaaatattatatttgcacttgctggaggcatgttcctctatatttctctggcagatatgtttccagagatgaatgatatgctgagagaaaaggtaaccggaagaaaaaccgatttcaccttcttcatgattcagaatgctggaatgttaactggattcacagccattctactcattaccttgtatgcaggagaaatcgaattggagtaatagaaaatggaagatggtgttgttaataaaggcatttaatagataaaaacatctccaaaaaggattttgaagctgatcctatttagttaaaaagataattttgctttcaaccgtaggtccagaaaactaattattggcatcagtctgtg

SEQ ID NO: 2157 - DNA, 323 bp, Homo sapiens
tggggatggaacacttccagtgatggtaagagatctgttatgaaacgaaacaccccccgtgttaataactgggtctgaaatctgtttttatgagccgggccccctgtgcctctagtatacttgtattgactctcatagttacccttttagttttactgtgttctgtgaaaatttgtaattggttgagaatcactgtgggcgtccattcttattcaactaaatctccacaggttttttgagctggtgtggattagtttaactcttgtattcaaccattagtgctaccaccttctcacattacaatacaattactggaagcaagt

SEQ ID NO: 2158 - DNA, 279 bp, Homo sapiens
actaacaaaaactctagcaatcaagaatggcagcatgttattttataacaatcaacacctgtggcttttaaaatttggttttcataagataatttatactgaagtaaatctagccatgcttttaaaaaatgctttaggtcactccaagcttggcagttaacatttggcataaacaataataaaacaatcacaatttaataaataacaaatacaacattgtaggccataatcatatacagtataaggaaaaggtggtagtgttgagtaagcagttattag

SEQ ID NO: 2159 - DNA, 543 bp, Homo sapiens
  misc_feature 425: n = A,T,C or G
cccagacatctgcatgcacaccccacattctacattacacagatattgcacaagtttcaatgccaaaatactaatgcagtctggcaagatttagggtttacctttcagtattattttgtgaaagtattcagattcaatactatttcgcagaaaagctacatgaccaatttcaggaaaagaatgcttgctatctttccttgatccacagtattaaaatctgtaacaatatatttaggcatttcatttatgttttccagcatttaaaattccgcaaaacctgtgtttgaaatttcttatagcattcctttacaaacaggagaagcttcgtctaatgtaaaaaaaattaaaggagtccacagggcaataatttttccaccagaggtctcactctacattctgaaaagcactgcagagcaatatttaangtctgtcactttcagagagccattaggagcaaagtctgctgaaaaccttgtaacataccatgacagctggatgggtttcttaatgcattgcacaatgtaattcaattgttttcctccc

SEQ ID NO: 2160 - DNA, 490 bp, Homo sapiens
gcctcagcggtctgcgcctggcagcaggaagctgttttaggttatgtgaaagagatgtttcctcatctctaaggcttaccagaagctctgatttgaagagaataaatggattttgcacaaaaccacaggaaagtcccggagctccatcccgcacttacaacagagtgcctttacacaaacctacggattggcagaaaaagatcctcatatggtcaggtcgcttcaaaaaggaagatgaaatcccagagactgtctcgttggagatgcttgatgctgcaaagaacaagatgcgagtgaagatcagctatctaatgattgccctgacggtggtaggatgcatcttcatggttattgagggcaagaaggctgcccaaagacgcgagactttaacaagcttgaacttagaaaagaaagctcgtctgaaagaggaagcagctatgaaggccaaaacagagtagcagaggtatccgtgttggctggattttgaaaa

SEQ ID NO: 2161 - DNA, 538 bp, Homo sapiens
  misc_feature 485: n = A,T,C or G
acaattctggggcaaccaggatttctccagtatttcaaatatagcctgtgtagcatgactcatgatatccacttcagtctggcctataagaagtccagcaaagcaaaattttgcagcaatcagctgttcctcagaccactgtgggtcattattggcatcatccttgaaaaacaactccactttaggtgggtaaaacttatatccttccttgacaccaggatttcttttgagaaaagaaccagttgctattcttctgcaaacccattcaattggaatcatttcacactgcggtgcaatgaaagctgtctccccacattttctggtgaaggcagttttaatacctgcttcctgtaataactgaaaaatacaactggtgattttatttgagattgcagcttttccttccaggtggttttttctagctgcatttcctgctgtaatctggtccttggactgcaggaggacttttcctggactgtctaacnattcgtagacttcttttgttttaccctcatataattttttaccaatgttcagt

SEQ ID NO: 2162 - DNA, 215 bp, Homo sapiens
acagaactcagaggaaaaaagaaattaaattttagctttctggagagcagcccctctctggcaccatcaaacacttctttgtttcccttcaacttggaactcttcaaacatcaggggttgtgagggtttggccattcttttatcttgggtccatgtgagtgacagaaatggtgcggcctgggaaagatctccctcctttacattttctcttctcc

SEQ ID NO: 2163 - DNA, 426 bp, Homo sapiens
actgttactaaaagctttatatgaaattattaatgtgaagtttttcatttataattcaaggaaggatttcctgaaaacatttcaagggatttatgtctacatatttgtgtgtgtgtgtgtatatatatgtaatatgcatacacagatgcatatgtgtatatataatgaaatttatgttgctggtattttgcattttaaagtgatcaagattcattaggcaaactttggtttaagtaaacatatgttcaaaatcagattaacagatacaggtttcatagagaacaaaggtgatcatttgaagggcatgctgtaatttcacacaattttccagttcaaaaatggagaatacttcgcctaaaatactgttaagtgggttaattgatacaagtttctgtggtggaaaatttatgcaggttttcacgaatc

SEQ ID NO: 2164 - DNA, 315 bp, Homo sapiens
ctgaattctcaatgcagggtctaaaagctggtgttattgctgttattgtggttgtggtgatagcagttgttgctggaattgttgtgctggttatttccagaaagaagagaatggcaaagtatgagaaggctgagataaaggagatgggtgagatgcatagggaactcaatgcataactatataatttgaagattatagaagaagggaaatagcaaatggacacaaattacaaatgtgtgtgcgtgggacgaagacatctttgaaggtcatgagtttgttagtttaacatcatatatttgtaatagtgaaacctgt

SEQ ID NO: 2165 - DNA, 322 bp, Homo sapiens
  misc_feature 26: n = A,T,C or G
accgcggccgttaaacatgtgtcacntgggcaggcggtgcctctaatactgatgatgctagaggtgatgtttttggtaaacaggcggggtaagatttgccgagttccttttactttttttaacctttccttatgagcatgcctgtgttgggttgacagtgagggtaataatgacttgttggttgattgtagatattgggctgttaattgtcagttcagtgttttaatctgacgcaggcttatgcggaggagaatgttttcatgttacttatactaacattagttcttctatagggtgatagattggtccaattgggtatgag

SEQ ID NO: 2166 - DNA, 519 bp, Homo sapiens
acatttataaagattttctttttgcagtaaataatttaggtcaaagtgatgacctcccatgctctaattctgattgattaaaccaacctgaagggtaaactggagactctttggcctgttagtcaataacaaaatggtttgtaaagaaaagaaaaaataaataccatatacaaataagtataactagcattcaagtctgttgcacctgtgtgttttagtgaaagggagaatgaaacttgtatgcatttgacgtgagcaggtattcacacagctaggaaacaggaaaagacggtaggatggcaacatcaccttctattgcacatttagtttaagacagcactttccgttgaaacacaactaccccaatggcatagtcttgtgatgtgggacagctaacgtgatggacgtctgcgcagcaggcccgaggttaggacggccactctgttagtgcaggtgagtgtaggtgcctcctcagctacactatctggaggatgtcacctgagtgcaactgggcaggcc

SEQ ID NO: 2167 - DNA, 284 bp, Homo sapiens
accatttaatggggaggacaaaatggggcaggggagggagaagtttctgtcgttaaaaacagatttggaaagactggactctaaattctgttgattaaagatgagctttgtctacttcaaaagtttgtttgcttaccccttcagcctccaattttttaagtgaaaatataactaataacatgtgaaaagaatagaagctaaggtttagataaatattgagcagatctataggaagattgaacctgaatattgccattatgcttgacatggtttccaaaaatggt

SEQ ID NO: 2168 - DNA, 490 bp, Homo sapiens
  misc_feature 484: n = A,T,C or G
actaggggtcaggcatgaacgtatctttttaggaaaaatcaattcattcccaatacctgagaactcgtcttttgcatccttgtaatagtattccccttttatttgaggagtgagagtgggtttccttgcttgtaaccggtgggtctccaccacagtggtttgtgggtgctcactttcatgtgagtgaggagccggggggccctggggtgtgctcccacgggctgtgtctgtccgcaccgcacaacaggtgacggccaaagctgtgggcagaaagtagagaactggatgcaagtgtttgccaggttggcctcggaatgttagatcagcctctggccccccaaacctccaggaaaagaagcagtggtggggttcagcctgaaccctaaacaacctccatgactggtcccgttcttattccattttgtgggtagagactggactggtgtttgaaggtttctcacattattttccgtgtctatgcctncacagt

SEQ ID NO: 2169 - DNA, 217 bp, Homo sapiens
actcagtgtggaaaagactacagattacacactcttttcattcacacttgtacatatagacagcaatgttattaggagcattaaattaaaaaactgaacagcctaatttaaatgtggcttgggcctggtagaagtttgaccaaatggaatggaggctgtgagcaatgtgaggattctatttatttatttacgtttgataaaacttactggaactagt

SEQ ID NO: 2170 - DNA, 334 bp, Homo sapiens
gttgattgatcagaccctcagccttacaagcaagagctcatgcagatccacagagccatgcacatcctgtcttcctgaccttcctcaggtggcaccacctgcgccccatggacctgctgtatcggtgtcatgtggaggtctgatgaatcctttaaaacctaactgtgatgtcgtaaatgtaactgtgctacctttatatctactgaagggcagcgtctgcatccgagggaaattcaacatgaaacaaccatcgttttagttgcactcagtctgtccatatgacatacacatgaagtgaatgtttccttatgttttcaggtctacaatgtttagt

SEQ ID NO: 2171 - DNA, 534 bp, Homo sapiens
actgctcaaatgagcagcaaccttctgccacctggcaagaacaggcgttcagtgcagggctggcctgcccctgcaggcttcagagaccactgcgtttcttagaagggaaacaacggggccgggcgcggtggctcatgcctgtaatcccagcactttcagaggccacggtatcccagcactttcagaggccaaggtaggtggatcacgaggtttggagttcgagatctgcctggcccatatagtgaaaccctgtctctactaaaaatacaaaaatcagccgggcatggtggaggaggaggaggaggagaaggaggagaaggaagaaggagaaacaacagtccagagatgatgccatttccggggaaagaggttgacttgaggaaggcagtcatgggaataaaagctcccacagatccctttcactaaaaagaaagcaggccgggtgcagtagctcacgcctgtaatcccagcacttgtgggaggccaaagcaggggaatctcgagttcaagaccagcctgggcaacagagcaaga

SEQ ID NO: 2172 - DNA, 419 bp, Homo sapiens
acatggcaattagaagttgtcatggcaaaagaaaaccacagctggcctgccacagccaacacaagaaccagaaaatggtagattaaatgaaggaataaaggtggggtttattccttattataaaagaaaaaaaaataattcttcagcagtcttaacaaagacatcaagatacaaaattacaagtgttttgactccagccctgtccccatctcctccaagagcagaggtaggagacagttgaagcaaacaagcaattctgtaaaaattacctagaaaccctacaaatttgattaaaatctaaacttctataattttgctttttaaaaaatttaatatcaaaaggcctgctttagtgacatgctattcctaccagaaaataaccccaataccccctctgtcagtaacatgctcaagttgac

SEQ ID NO: 2173 - DNA, 547 bp, Homo sapiens
  misc_feature 36, 69, 85, 193, 253, 380, 397, 421, 459, 491, 519, 546: n = A,T,C or G
acaagcttttttttttttttttttttttttttttanacaaataaaattctttatttaaatttctcttgnggggaaaatatttttntttaaagcacacttaaaagtaatttgcatttacttcctgtaaagcatttccatttcacaattagcaaaactaaaaggctatgtctcttcatgcatttatttttgttanaaaaatgtcccatggtgctatcaaaccgattttaaccatcatcaagcttaactttgcctntgttgacaacatgactacaaacatgaatcaaaaaggagttaaggaattttaagccataaggtttcaattatagcttaccaattatgtaattagctgacaaaaatcaagtctgatgtaaaatagctgncatctacttaactgcanataatcatggcattttcatttaanatgatctgaacttatgaaataaaggatccagtctcaanaactcaataatctcttatgttttcttttgaanacttattttaaatattaactatttcggngcctgaatggaaaaatataaacattanc

SEQ ID NO: 2174 - DNA, 553 bp, Homo sapiens
acaaaagatgttggagtccagtaagcccatacctaaattaactgtaaagcttcaaggactttttgtttatttttatatactagttttcttctgtgacaagttgattttatctccaagacttaaggccattccctggctctttgcacgaattcttatatggccggtaacagcagcatctggtccctggtgaattggcttctcaatgctgacatttgcaagtgcatcttcaccaaatatggaacgagcataaaggttggctgccataaagccacagtaaccagaaagggccttttctggagtcaggcatttcatattggttgactttaatatgtgctgtaagtagtcatttaaatcaaccatgttggtgttaactgtcactttgttttcccattcaaattcggcccacatctgacggaattctgcatcagtgcaagttgcaggctggatatagtccatgatgtcgatgtgaatatcactgagaaccacacaatttctgtcacttgctgctccagagacatcataaactatattaccaaaaattattccattttct

SEQ ID NO: 2175 - DNA, 184 bp, Homo sapiens; identical to SEQ ID NO: 1935

SEQ ID NO: 2176 - DNA, 410 bp, Homo sapiens
tttttttgaactaaaaaaaagaagagattgttttattgtgacatttatgacattgaccccttgttgacaggaatgaccgagggtaatcttggcatattgcacatgctgtgatgaaggatgcactggtgatcctctggtcactgaggctgtttcctggtcctcccagacctctatgcacgtgtgggccagtcacagaaatttcattaccacttggtgtatacatttaacaagtctttggtcttaataagcaccattacaaaccctcacattaagggcattattattctagtttataaatgtttcaatgataaaaaatagcacgattacagtatacacacacttaatttacatgtaatgtattatactcataactgagataagctactgaactaactttggttgattgaaat

SEQ ID NO: 2177 - DNA, 422 bp, Homo sapiens
acatagtttagcagggctaattagcataagatgctatttattaagaggtatatgatctgagtattaacagttgctgaagtttggtatttttatgcagcattttctttttgctttgataacactacagaacccttaaggacactgaaaattagtaagtaaagttcagaaacattagctgctcaatcaaatctctacataacactatagtaattaaaacgttaaaaaaaagtgttgaaatctgcactagtatagaccgctcctgtcaggataagactgctttggaacagaaagggaaaaaacagctttgagtttctttgtgctgataggaggaaaggctgaattaccttgttgcctctccctaatgattggcaggtcaggtaaatgccagaacatattccaactcaacaactctaggtaacttt

SEQ ID NO: 2178 - DNA, 411 bp, Homo sapiens
actggtctatgacatacatatcgtttacagggatggaatctgtttctgggttgaaatcagccacatttcccaaaagaaagcgaagtgtattcctaagcttgctaatatcatctctggcagcattgagcacggatgggccaattgcaacttcggtgaagacattggaatcagctacccaccagcgaaggacatcagcaccatacggaggctctttgctttgatcttgtcctccattaacgacaacatcaggatgaatgacattcccaagagacttggacatcttttctcccttttctccaagggtaaatccatgaacaatcactgtcttataaggtgctctcttccttgctgccacacttgttaataaggatgactgaaaccaacccccgagctggtcttttccttccaagt

SEQ ID NO: 2179 - DNA, 448 bp, Homo sapiens
  misc_feature 38, 43, 72, 119, 125, 142, 147, 156, 160, 166, 171, 197,228, 230, 268, 288, 290, 304, 352, 357, 363, 390, 399, 410,424, 434: n = A,T,C or G
acaagctctttttttttttttttttttttttttttttncccancaaaaataaaatttaattggactcaagtntgggcagtttgtccttcctcaggaccagccgtcagcagtccctgacnaaagcnccccattctctccacanacagntggttccanaagnaccttntgaanctggtcttccgggtaggatgtgctgngggagggttctgtttccgaggaggaaaggcncnacacagcgtgcaaggacctgcagcaccttccacgcagnaccccctgctcctcctcctnancccctgccgggctntgactcctaagtcaggcaggagctttttcaggcccctggctgaggaanagccncagccnccctaaaatggcttcgggggcatgcanccctccatntccagcagctntggccatccctcgnatttgtttgngtctgggctgttct

SEQ ID NO: 2180 - DNA, 354 bp, Homo sapiens
accagcagaaaggttagtatcatcagatagcatcttatacgagtaatatgcctgctatttgaagtgtaattgagaaggaaaattttagcgtgctcactgacctgcctgtagccccagtgacagctaggatgtgcattctccagccatcaagagactgagtcaagttgttccttaagtcagaacagcagactcagctctgacattctgattcgaatgacactgttcaggaatcggaatcctgtcgattagactggacagcttgtggcaagtgaatttgcctgtaacaagccagattttttaaaatttatattgtaaatattgtgtgtgtgtgtgtgtatatatatatatatatgt

SEQ ID NO: 2181 - DNA, 558 bp, Homo sapiens
  misc_feature 517: n = A,T,C or G
gcagagcacagcatcgtcgggaccagactcgtctcaggccagttgcagccttctcagccaaacgtcgaccaaggaaaactcactaccatgagaattgcagtgatttgcttttgcctcctaggcatcacctgtgccataccagttaaacaggctgattctggaagttctgaggaaaagcagctttacaacaaatacccagatgctgtggccacatggctaaaccctgacccatctcagaagcagaatctcctagccccacagaatgctgtgtcctctgaagaaaccaatgactttaaacaagagacccttccaagtaagtccaacgaaagccatgaccacatggatgatatggatgatgaagatgatgatgaccatgtggacagccaggactccattgactcgaacgactctgatgatgtagatgacactgatgattctcaccagtctgatgagtctcaccattctgatgaatctgatgaactggtcactgattttcccacggacctgccagcaaccnaagttttcactccagttgtccccacagtagacacatatgat

SEQ ID NO: 2182 - DNA, 372 bp, Homo sapiens; identical to SEQ ID NO: 1557

SEQ ID NO: 2183 - DNA, 328 bp, Homo sapiens
gctcccgcaaagaagggtggcgagaagaaaaagggccgttctgccatcaacgaagtggtaacccgagaatacaccatcaacattcacaagcgcatccatggagtgggcttcaagaagcgtgcacctcgggcactcaaagagattcggaaatttgccatgaaggagatgggaactccagatgtgcgcattgacaccaggctcaacaaagctgtctgggccaaaggaataaggaatgtgccataccgaatccgtgtgcggctgtccagaaaacgtaatgaggatgaagattcaccaaataagctatatactttggttacctatgtacctg

SEQ ID NO: 2184 - DNA, 360 bp, Homo sapiens
acaagggcatgacaggctgggaggtggctggtgatcacatttacacagctgctggagcctcagacaatgacttcatgattctcactctggttgtgccaggatttagacctccgcagtcggtgatggcagacacagagaataaagaggtggccagaatcacatttgtctttgagaccctctgttctgtgaactgtgagctctacttcatggtgggtgtgaattctaggaccaacactcctgtggagacgtggaaaggttccaaaggcaaacagtcctatacctacatcattgaggagaacactaccacgagcttcacctgggccttccagaggaccacttttcatgaggcaagcaggaagt

SEQ ID NO: 2185 - DNA, 175 bp, Homo sapiens
  misc_feature 39: n = A,T,C or G
acccattgaaacctgcgtatttgtgtatagcagaactcngaaataatattctgatagcagttatctctgaggaattgggttataggtgattttccctttccgcatgataaatttatgtaatatttgactgacttgaccgtaagtatgttacttgtataataaaaggaaaaaaggt

SEQ ID NO: 2186 - DNA, 534 bp, Homo sapiens
acaaaattcttaatttaagagattgtatgtaatatttatttcattaatttctttccttgtttacgtaaattttgaaagattgcatgatttcttgacagaaatcgatcttgatgctgtggaagtagtttgaggaacatcctatgagttttcttagaatgtataaaggttgtagcccatccaacttcaaagaaaaaaatgaccacatactttgcaatcaggctgaaatgtggcatgcttttctaattccaactttataaactagcaaaaaagtgtttgcttattccaccagttctactgtgacatactcgagtataaagacatgtagcaataacggggagtgggggggggagtctcacagtgcctttggaagggcccgaacttgccttaaatcttcctcaaccaaataagtattttattagtgcttgagagaatctgaatgtaggatgggttcaactgcacaaaaggaaaagatttttaccactttttttatatagatataaagtgaagcaaccgccttagtgctgaatatgtagt

SEQ ID NO: 2187 - DNA, 393 bp, Homo sapiens
actcatacacccctcagctccaagacttagaccccctggcgcaggagcacacagactcggaggaggggccggaggaagagccatcgacgaccctggtcgactgggatccccaaactggcaggctgtgtattccttcgctgtccagcttcgaccaggattcagagggctgcgagccttctgagggggatgggctcggagaggagggtcttctatctagactctatgaggagccggctccagacaggccaccaggagaaaatgaaacctatctcatgcaattcatggaggaatgggggttatatgtgcagatggaaaactgatgccaacacttccttttgccttttgtttcctgtgcaaacaagtgagtcacccctttgatcccagccataaagt

SEQ ID NO: 2188 - DNA, 378 bp, Homo sapiens
  misc_feature 150, 181, 216, 222, 234, 243, 252, 264, 288, 348, 375: n = A,T,C or G
acttgcgctctgggggtgcgatgatcttgatcttcatggtgctgggcgccagggcggtgatctccttctgcatcctgtcagcaatgcccggatacatggtggtgccgcccgacagcaccgtgtctttttttttttttttttttttttttnccagccgggttggagtttatttctgccaaancctggaggctgggagggtaaaggacattcctttantcccanagggaagctccnaaccctcanagcaaccanaagggagggcanagcatgggcagcagcaggagtganaggggtccccttgtcctgcccctttgcaagggttcaaggctggtggaggcctggggcttntgtcgctcaggagttcaggggtggacncaa

SEQ ID NO: 2189 - DNA, 171 bp, Homo sapiens
acaaatgtagtaaagaagtgtcagggaggcagctgttacaccaaaagatgcacattcaataaagttacaggactctatgaaaaaggatgtgagtttgttctccaatcccgccagacggagaaggcttctataatgtttgcacaacatgttgattctatagttgaattctgt

SEQ ID NO: 2190 - DNA, 273 bp, Homo sapiens
acggccagggctattggttgaatgagtaggctgatggtttcgataataactagtatggggataaggggtgtaggtgtgccttgtggtaagaagtgggctagggcatttttaatcttagagcgaaagcctataatcactgcgcccgctcataaggggatggccatggctaggtttatagatagttgggtggttggtgtaaatgagtgaggcaggagtccgaggaggttagttgtggcaataaaaatgattaaggatactagtataagagatcag

SEQ ID NO: 2191 - DNA, 331 bp, Homo sapiens; identical to SEQ ID NO: 1682

SEQ ID NO: 2192 - DNA, 538 bp, Homo sapiens
accaactcttgaaagcctatattactagtcatttcccattgagtattttggaattttattattctatttattcatattctacttatttataatgtattctgctttatgatgtttatctgaataatctggacaaattctcattctgggcagtcattcatttcatcctatgaatgccatggtaagggaaacaccgtagttaagaggaacagatgaagtcggaacactcacatgcatcacagtcacaaaactttaagtcacgagatggaaaagacattgattctgctttggatcaaagtttatagaacactacttaatggaaactagtggaaatggctgctaaaggaaaagttaaggtgaatgatccaagctgacttgatttactgaatccagaacaaaattatgctaaatctctctggtaattaactaaataaaaatgattttatactactactaagttagtaaaggggtgctactcattagacgctaatctcatttactgaggaacacagaattgtatgttttccacagttcagccagt

SEQ ID NO: 2193 - DNA, 485 bp, Homo sapiens
acgcgtctggcacgccacccccactggaggtcctgaatggtccacagagaaggcgtggggcaaggcctcaagtgctgatgctctgagaataaaaattaaaaggcagctctgccctgaagcgtcaccccacagggctcattccttggctgtgccctcctgggtcccagggtggacacatggatttggtgtcatcatcgctcgtgcttgatgttggcttcacttcgctccaaggccaccccgctgccgttccgaggggcgtccttcttgctccagtccttttcagtgtagaactcggctagcactgggcagtgttcagaagccaccccgccccaagaccagttatccggaatccaagggttcgtgaggccttctctcaccacagcccagtgacctgtgaaaaccttctttaagcttttactgatccagatgttgtccagagacttcgagccttgagggttcttggtgctgatgttggtgaaggtgtg

SEQ ID NO: 2194 - DNA, 172 bp, Homo sapiens; identical to SEQ ID NO: 2035

SEQ ID NO: 2195 - DNA, 220 bp, Homo sapiens; identical to SEQ ID NO: 2136

SEQ ID NO: 2196 - DNA, 582 bp, Homo sapiens
ggctgaccagcctcgctcagcaccttctctcagacccaaggactatgaagttgatgctactctgaagtctctcaacaaccagattgagacccttcttactcctgaaggctctagaaagaacccagctcgcacatgccgtgacttgagactcagccacccagagtggagcagtggttactactggattgaccttaaccaaggatgcactatggatgctatcaaagtatactgtgatttctctactggcgaaacctgtatccgggcccaacctgaaaacatcccagccaagaactggtataggagctccaaggacaagaaacacgtctggctaggagaaactatcaatgctggcagccagtttgaatataatgtagaaggagtgacttccaaggaaatggctacccaacttgccttcatgcgcctgctggccaactatgcctctcagaacatcacctaccgctgcaagaacagcattgcatacatggatgaggagactggcaacctgaaaaaggctgtcattctacagggctctaatgatgttgaacttgttgctgagggcaacagcaggttcacttacactgt

SEQ ID NO: 2197 - DNA, 360 bp, Homo sapiens
  misc_feature 45, 73, 100, 112, 137, 169, 178, 193, 197, 221, 225, 241,249, 265, 266, 289, 326: n = A,T,C or G
acaagcttttttttttttttttttttttttttttttttatatttnaacaatgtttattattcatttatccctntataaaaccaccacccacaccgagganattatttggagngggtcccaacctagggcctggactntgaaatctaactccccacttccctcattttgngacttaggngggggcatggttcantcanaactggtgtctcctattggatcgngcanaaggaggacctaggcncacacatntgggggccacacccannagggttgattggcaggctggaanacaaaagtctcccaataaaggcacttttacctcaaanagggggtgggagttggtctgctgggaatgttgtt

SEQ ID NO: 2198 - DNA, 420 bp, Homo sapiens
acgaagttctcagtttcactttagtagaaagagctctagaaatgaggctgataaacacatctaagaacactggttgctttctaaaatttccaaagctccaccataaatgtaatttttagtgtttcaaatgattgcattttaaagtatataaatatgggttatccaatatcaatgctatagtaacatcctgaaacaaaacaagcacaaaggtataaatgcctaaactggaggaaacttgaaaccctcatgttaaatcttaaatgtagtatttctaacttgtgaagacagattggtaggcagccatttttttgtgtcttaaaataactgggggcatagttaaaattttatacatcaagtgattgctattattgaatgttgcaggtgagatgtggttatttttagtttatttgaaatgtttga

SEQ ID NO: 2199 - DNA, 171 bp, Homo sapiens
accttgagcatcatcttcaagctgaggctccagctctgggcaaacagctgctgggtggacctggtccttctggcctggatgggggcctccaaggaactacttgttctcatacttgtgcttgatgtgtttccacagcttcccctcgttgatgtggtcgtagatagcgtccgc

SEQ ID NO: 2200 - DNA, 483 bp, Homo sapiens
aattagaactcctttctccaaagccagaaactacagaatgcattccaaagccagagagcaggatttagggatcctattccaccagcatttctccacaaaaggagctaccggtgtttagaaaggccatctttgttatgctccatgacttttgccctgttaaatgcttagtatcccaggccccagaaagccctataagccagtagagaaccacactcttgttgtcactgagacaacctgaaaggtttccacacttccccctgggtggggaatgggtcccactgagaaccattgactgttctgattgatgatggcagggtgcttgtttttgtttttaatttgcagcttctggttatcaagaccaaataggttttctctccccaatttttagggggcttgttacagaaaaataatcataaaatgaacaaaacctcagagcccgggtcatcttctgcaggtaagagtcctgtctctgaatactaaggg

SEQ ID NO: 2201 - DNA, 487 bp, Homo sapiens
  misc_feature 364: n = A,T,C or G
acagtattcatttatgcttgaaattccagtcctagaccaagcttgtggccaccagcattgacgttcttgccatccagaagagctgacagtgtcagtttaatacctggctttagagtctgagtgtatcctaaacctatcaggctggagttgttcactttagccgagaagcaggcgtcagggtcaatctgatacttggctgctattccgaagcgcgtgttactgtttcctgctgtccaggcaagattgacagcggtctccaacttcttgttcactttctggtaaatggagccgccaaactctgtcccgtcattcacattagtgtgaagctggaattcatcagtcttgtagccaactgcaaagttgntctgggtcactcgggattttgcagtctcaaaattcatctggtagccggccagccagccctcgtaacctagcaccagagcaccccggatggaaggcccagcaatgtcgaaatccatgtcgcagc

SEQ ID NO: 2202 - DNA, 484 bp, Homo sapiens
acatgacaaggtgcggctccctaggcccctcccctcttcaaggggtctacatggcaactgtgaggaggggagattcagtgtggtgggggactgagtgtggcagggactccccagcagtgagggtctctctcttcctcttgtgctcttgctggggctggtggtccaggggtcttactccttggaggccatgtgggccatgaggtccaccaccctgttgctgtagccaaattcgttgtcataccaggaaatgagcttgacaaagtggtcgttgagggcaatgccagccccagcgtcaaaggtggaggagtgggtgtcgctgttgaagtcagaggagaccacctggtgctcagtgtagcccaggatgcccttgagggggccctccgacgcctgcttcaccaccttcttgatgtcatcatatttggcaggtttttctagacggcaggtcaggtccaccactgacacgttggcagtggggacacggaag

SEQ ID NO: 2203 - DNA, 158 bp, Homo sapiens
tgggaactctcaccagcctgtataccagtcttgctttagggtgaccttctggccctggagcatgggtagctggcatagaggggtatgggttgcctgccccattctgctgctatagctgaacagtcctttccccttccctcgctgggcagcttggaggt

SEQ ID NO: 2204 - DNA, 78 bp, Homo sapiens
cttgggctctatgggaaggaccagcaggaggcagccctggtggacatggtgaatgacggcgtggaggacctccgctgc

SEQ ID NO: 2205 - DNA, 519 bp, Homo sapiens
acttacaaagttacaaccatttgcttccttaacattttccatgttaagttcatacatgtagatatgatcagatttaccatttttagggggaagagggaaaaaaaggtgtatttatcatcagctagatgtgctcactgtatgctccgttatttatatgcaaggcccgggtgactggaagtgcagttgtcaggcattttaataaactggacagccatttgtttctgcacgacaaggcatctttacacaggagcaatcgggagaaaacaggaaacagccaagcactctgcactgcaacacgccaccttaacagctaaccagcattactcaactgctacacaactgcgcctagtgcacaaaaatacataagagaagagattagaattgtgtttgataaacaatcctttcaaaaaatcaagtcttttcacctgaaaagtctttatacaaatttgggttcagattaccatttagatctgaaggtaaataacatatacaaatttacaccaacttttgtaggttttt

SEQ ID NO: 2206 - DNA, 494 bp, Homo sapiens
accacacagattcaggggaggcaaagagagtgggccaagagaaaaatattaaaaggagctgaatctgcctaaagacacatttgctctgatttctgaaattctttcagaaagcaaacagcaggtaataattctgcgttcatgagtggagtctagggatgttaccaagttgttcacttctaaatcagtcatatctaaatcacacgtttgtgaacaaagtataggcaatctgaagccacatactttttaaactatgttagagttacaactacctaggaaatgtcatatttaacttctggtcttagtaaaacttttctttgcagacagggtgaagctgagctgagcgtggtggctcaggcctgtaagcccagcactttgggaggctgaggcaggcggatcaactgaggtcaggagttcgagaccagcctggccaacacggtaaaaccccatttctactaaaaatacaaaaattagctgggcatggtggcaggcacctg

SEQ ID NO: 2207 - DNA, 483 bp, Homo sapiens
  misc_feature 470: n = A,T,C or G
gctggggccccagcgggggctatgtcttccagaagacctacttagagtttttcacttcccgcgagacagcggaagcacttctgcaagtgctgaagaagtacgagctccgggttaattaccaccttgtcaatgtgaagggtgaaaacatcaccaatgcccctgaactgcagccgaatgctgtcacttggggcatcttccctgggcgagagatcatccagcccaccgtagtggatcccgtcagcttcatgttctggaaggtggtggaagacacattggagcttctcaacaggcccacccagaatgcgagagaaacggaggctccatgaccctgcgtcctgacgccctgcgttggagccactcctgtcccgccttcctcctccacagtgctgcttctcttgggaactccactctccttcgtgtctctcccaccccggcctccactcccccacctgacaatggcagctagactngagtgaggcttcc

SEQ ID NO: 2208 - DNA, 339 bp, Homo sapiens
  misc_feature 54, 86, 118, 184, 202, 244, 302: n = A,T,C or G
acagcagcatggcctccatggcctggtgcttcttcaccaccaggtggctgtccntgcccagcccgtgcaggatgggcagcaccttntccgcaaagtgcagggggcgctctgcctcctncctctcgttgacctcaaagcaggtccaatagtccttctccctgatgcccacgttccggcgatccangatctccagggtgagctnctcagcagtcatggatgctgggaccttgatatgctgctcagnctctgccttcttctcttccagatacactgtgcagatgaagtcaccggcatgctgggtnccactggcagtgccagccacgcgcatcttcacaatgg

SEQ ID NO: 2209 - DNA, 487 bp, Homo sapiens
acaaaggccccgggggtgggagttaagctggcgtgtttgaagaacagtgaggagataacaggcatttccccaaatgtgttcagtgggtcggtagacagttggcatcaaaaagattccaaggtcgaatagcctgggacatgcttagttaaggcaaggcaaacacgttgctttactacaagacttctgggagccttcagtatgctgctgttcatcaggacccttcaaggctggaaggaaagaaaggacgtagcatttcccaaacatatttatctcagagctcacacttcctggagtatcttgggtgggggatgaacgctgggcaggaaatgggtatgctaagtaaagctttggagatggttagagggcccgcaccagagcaggtgctgagcagggttagggtctaaaccagattcaagcacaatctaagtataacagttgggaagacagatggctcatgaaggtccatgtgatagggaagctgggcaac

SEQ ID NO: 2210 - DNA, 496 bp, Homo sapiens
acatcttcagaatgtttctggagttgaaaggcacagtgcaaatagaaattactacaatcaacaaaattgattttaaaaagtatttttagcacaaaaaagttttctttatatcatactaaattcagagcattacatcattcccagaatacctagtttgaagcttatttttttttccattcacttgcaagctggattaagacattaactataataatatggaatgttcagcatttatgtttggtaaccagatgtatatggtttgtataaccatactttagaatttagttcagataaattggttttggtatactttgactacagaaagtgatttcaacataagatgtgatgaaggaagtctcccatgaaaaacttagtaaggatcaactgatgctatggacaaaacctaaaaaaagagatttgtagatgctttcaaggctttgactatgaaatatagaaaactggatgggcattcttactgaccggatgcttacaattt

SEQ ID NO: 2211 - DNA, 544 bp, Homo sapiens
accattttatttagtgttgtaggaaatgttgggttacttcttaaaaacgaaaccaaagaaattcaaaagtcccaaagaaagaaagcaggaaataataattctataatccaaaaacgttgggcgatccttcagttggaggaagagggcgtcagttaagtagctcacacagtagatatggagacaccatatggagatacggagttaagtttggtggatactaggaattaagttctccacctaaggcaattaatttttcagccttgagagataattagtagttctagaaaaagaaaaaaagttgactgggagaagggtgggagggaggatggtgcgtcatttaacattaaattgcctctctctacagtatgtggctgagcatcatggaccttcctccctctgccccgttgagctcccactgttagcaaaactgagaagcacatgcctgtgtcttcttcataccggcatgtgcacacacacctgtatctccttcatacaggcatatgcagagccctcaccaatcggggtccacagctgttcagtatgg

SEQ ID NO: 2212 - DNA, 509 bp, Homo sapiens
acaggtgggatcgactgtaaatgaggacttctggaacattccaaatattctggggttgagggaaattgctgctgtctacaaaatgccaagggtggacaggcgctgtggctcacgcctgtaatcccagcactttgggaggctgaggtaggaggattgattgaggccaagagttaaagaccagcctggtcaatatagcaagaccacgtctctaaataaaaaataataggccggccaggcacggtggctcacgcctgtaatctcagcactttgggaggccgaggagggtggatcacgaggtcaggagatcgagaccatcctggctaacacggtgaaaccccgtctctactaaaaatacaaaaaattagccaggtgtcatggcgggtgcctgtggtcccagctgctccagaggctgaggcaggaggatggcgtgaacccaggaggtggagcttgcagtgagctgagatggcgccactgcactccggtttgggcgacacagtgagactccatct

SEQ ID NO: 2213 - DNA, 449 bp, Homo sapiens
caatgttctcatttaaacattacccagcatcattgtttataatcagaaactctggtccttctgcctggtggcacttagagtcttttgtgccataatgcagcagtatggagggaggattttatggagaaatggggatagtcttcatgaccacaaataaataaaggaaaactaagctgcattgtgggttttgaaaaggttattatacttcttaacaattctttttttcagggacttttctagctgtatgactgttacttgaccttctttgaaaagcattcccaaaatgctctattttagatagattaacattaaccaacataattttttttagatcgagtcagcataaatttctaagtcagcctctagccgtggttcatctctttcacctgcattttatttggtgtttgtctgaagaaaggaaagaggaaagcaaatacgaattgtacctg

SEQ ID NO: 2214 - DNA, 246 bp, Homo sapiens
accatgtgctacaggggccagaagatgaacagactgaccttgatgagctgtgcacaaagtggcataaaaaacatgtggttacacagtgtgaataaagtgctgcggagcaagaggaggccgttgattcacttcacgctttcagcgaatgacaaaatcatctttgtgaaggcctcgcaggaagacccaacacttgggacctataactgcccagcggacagtggcaggacaggaaaaacccgtcaatgt

SEQ ID NO: 2215 - DNA, 396 bp, Homo sapiens
ggccctgctgctcctcagaatcctggtgccttgaagttctctgtgcatctgtccatcctccctatggccctggccagagctcagcatgggcaggggttctgggtaggacggtcactgtcctctctcctggactggtcttcccagccctaaaccctgccccaggaagcccacagcctcacctgctgctgcccctctaggtctgggcagccatgacctgcagggcccagagacactgtccttcccctcatccacccaaggccccagccagcgctcataccctgtcctttctccctgaccccaagggcacagaggcaaggcctcctgtctacagcagcttcctcagtttcctactgccttaggaggcccctgcttgtgctcagggaaggcctcttcatg

SEQ ID NO: 2216 - DNA, 62 bp, Homo sapiens
cgcctgcttcctcggccctgaaatcatgcccctaggtctcctgtggctgagcctagccctgt

SEQ ID NO: 2217 - DNA, 421 bp, Homo sapiens
acgaacccttacggcaagtccaagttcttcatcgaggaaacgatccgggacctgtgccaggcagacaagacttggaacgcagtgctgctgcgctatttcaaccccacaggtgcccatgcctctggctgcattggtgaggatccccagggcatacccaacaacctcatgccttatgtctcccaggtggcgatcgagcgacgggaggccctgaatgtctttggcaatgactatgacacagaggatggcacaggtgtccgggattacatccatgtcgtggatctggccaagggccacattgcagccttaaggaagctgaaagaacagtgtggctgccggatctacaacctgggcacgggcacaggctattcagtgctgcagatggtccaggctatggagaaggcctctgggaagaagatcccgt

SEQ ID NO: 2218 - DNA, 123 bp, Homo sapiens
actgtttacaaccggtattagaaattgagatgtttttattttgactatttgagagtaaaattgtagataatgttccaaaccatcatcaaaaatgcagagcaaacttttctgtatataaactgt

SEQ ID NO: 2219 - DNA, 183 bp, Homo sapiens
acacctgcatgccacacacacgcacaccaatgactgcagatgtgctctgctgacattttcggatctggttggctgccttctcctctgaagcatcatcaccatgttgtcgtgtgcccaccttgaggtcaaggacacaaggcacctcgtagcgggaagtcaggttttccagtaagataaatttgt

SEQ ID NO: 2220 - DNA, 600 bp, Homo sapiens
  misc_feature 562: n = A,T,C or G
gcaaaggcttctctttactgtcactgatttttttttgtttttattttgtttccttgtttctatttccttgaagctttgaagggaggagaagcagaaaattttgtttatgtttgttaaaaatcagaactacttaatgctttttgccacagcatatttccttgcctgttggagccgttaggaagattacctatgtcctaatcttcaacctgagaagatttttgactcttgtgtctactgttgattgtttgcttgagttctcaaagacctgtggccaggtattttaaaaagtcgtctatttctttctagttgcatcaacttgcacactggtgtctaactatatgtggtattcggaacttgtaattcttattgagcagccattgcctatattttctcagctcctcactgatttctttatatgagctcagctgacaagcaaatgcagctattttgtttaccctctcttcataccggaccatcaacaacagtgttctaactcatccctgatggtctgtgagatgtagactattacacaagattcaagttactcgtaagcaacttttanatagagttggtcctgttaggaggagactcttgatgtca

SEQ ID NO: 2221 - DNA, 219 bp, Homo sapiens
acttgtgggccagcttaagcagctgagtagctgtttggcggtccagggcctgggtgaactggttaatcgcaggagaagaagcagagactgttggcccgggccgagaagaaggctgctggcaaaggggacgtcccaacgaagagaccacctgtccttcgagcaggagttaacaccgtcaccaccttggtggagaacaagaaagctcagctggtggtgatt

SEQ ID NO: 2222 - DNA, 548 bp, Homo sapiens
  misc_feature 492: n = A,T,C or G
acgggaccctgttcacgatggaccgggtgctgacccccccaatggggactgtcatggatgtcctgaagggagacaatcgctttagcatgctggtagctgccatccagtctgcaggactgacggagaccctcaaccgggaaggagtctacacagtcttcgctcccacaaatgaagccttccgagccctgccaccaagagaacggagcagactcttgggagatgccaaggaacttgccaacatcctgaaataccacattggtgatgaaatcctggttagcggaggcatcggggccctggtgcggctaaagtctctccaaggtgacaagctggaagtcagcttgaaaaacaatgtggtgagtgtcaacaaggagcctgttgccgagcctgacatcatggccacaaatggcgtggtccatgtcatcaccaatgttctgcagcctccagccaacagacctcaggaaagaggggatgaacttgcagactctgcgcttnagatcttcaaacaagcatcagcgttttccagggcttcccagaggtctgtgcgacta

SEQ ID NO: 2223 - DNA, 194 bp, Homo sapiens
cggggcaggtttttttttttttttttttttttttttaaaatgtttttagctttattaaagacatattatagtagacaaacaagtagacaaacacatgctctataaaatatacattctgatgtgtgacaaaatataaacagatactaagaaatgactacactgaacaatgacttggcttgtatctctgtttaggt

SEQ ID NO: 2224 - DNA, 471 bp, Homo sapiens
  misc_feature 75, 107, 162, 189, 209, 232, 246, 353, 398, 445, 448: n = A,T,C or G
acaagcttttttttttttttttttttttttttttacagataactcaggatcatgtttaattatgtaaaaaagctntaaagtcaggtaatgtttttcatgtgcttctnttgagcagtctgaggaaagaatagaaacagaaaccccttgggacctgagtagacncagctggccatgcacaggcagaggctntgggtcagtgcaggaagcanagtcacagccagcgccttggggnggggatgaaagganatgacctggtggctgcgtgacagccactgtaggactttgatctcagggggacaagctgacacaggcagctgggaattctgggcaggcacaagcaggcatcacagaanagtgataaccaatcctagttaaaatagtctcaggagtcagtgcanaagccctttctgactcctttgacggatgataaggcccagcccaaggnaanatcagccccagcacgaagcctcc

SEQ ID NO: 2225 - DNA, 381 bp, Homo sapiens
acaagtccttcatcaaggactacccagtggtgtctatcgaagatccctttgaccaggatgactggggagcttggcagaagttcacagccagcgcaggaatccaggtagtgggggatgatctcacagtgaccaacccaaagaggatcgccaaggccgtgaacgagaagtcctgcaactgcctcctgctcaaagtcaaccagattggctccgtgaccgagtctcttcaggcgtgcaagctggcccaggccaatggttggggcgtcatggtgtctcatcgttcgggggagactgaagataccttcatcgctgacctggttgtggggctgtgcactgggcagatcaagactggtgccccttgccgatctgagcgcttggccaagt

SEQ ID NO: 2226 - DNA, 339 bp, Homo sapiens
acttttaacgtatgtatttcattgctgtgtcacactctgtgttttgtgaggtgaatgtcttccttttctttctccctaaccactaatgttagaattgatttccaagaatcggcatgtatacttaatactgaatttctttgatttaactgacttaacaactgactaaccattgatgagcactcctgatttttatctagaacattcagatttaccataatgttccttagtggtagaggtgtgtgcctagtgatgtagaaagatacactgacttggtgcaaggccatctgcttaccacatcacaccacttggagatctttgcttccttgcttttatgtttgt

SEQ ID NO: 2227 - DNA, 390 bp, Homo sapiens; identical to SEQ ID NO: 1468

SEQ ID NO: 2228 - DNA, 462 bp, Homo sapiens
  misc_feature 406: n = A,T,C or G
ttttaaatgagccaagactagaggggaaactatcacctaaaatcagtttggaaaacaagacctaaaaagggaaggggatggggattgtggggagagagtgggcgaggtgcctttactacatgtgtgatctgaaaaccctgcttggttctgagctgcgtctattgaattggtaaagtaataccaatggctttttatcatttccttcttccctttaagtttcacttgaaattttaaaaatcatggttatttttatcgttgggatctttctgtcttctgggttccattttttaaatgtttaaaaatatgttgacatggtagttcagttcttaaccaatgacttggggatgatgcaaacaattactgtcgttgggatttagagtgtattagtcacgcatgtatggggaangtagtctcgggtatgctgttgtgaaattgaaactgtaaaagtagatggttgaaagt

SEQ ID NO: 2229 - DNA, 413 bp, Homo sapiens
  misc_feature 62, 91, 107, 114, 129, 170, 220, 265, 282, 345, 397: n = A,T,C or G
acaagcttttttttttttttttttttttttctttttttttttttattatgaaaatgactgcnccggtgaagcttcagggggtttggatganaatggctgttactacnagggctntgtggctgattgaanagtatgcaatgagcgattttaggtctgtttgtcgtaggcanatggagcttgttataattatgcctcatagggatagtacaagtgtggcctnatcaagccctgcccagccaactactttgcgtttaaaatctgcagnggggccgccaacgtcgngggccctactatgtgctttgaaaaccgcatgatcatgagtcctgtgaaaaacaatgtgggcanaggtctaaacatcgccctggtgaatggaaccacgggagctgtgctgggacanaagtcatttgatatgt

SEQ ID NO: 2230 - DNA, 459 bp, Homo sapiens
cagacatgcaaacaccagactgaagcacatgtaatatagaccgtgtatgtttacaatgttgtgtataaatgggacaactcctcgccctctacctgtcccctccccctttggttgtatgattttcttcttttttaagaacccctggaagcagtgcctccttcagggttggctgggagctcggcccatccacctcttggggtatctgcctctctctctcctgtggtgtcccttccctctcccatgtgctcggtgttcagtggtgtatatttcttctcccagacatggggcacacgccccaagggacatgatcctctccttagtcttagctcatggggctctttataaggagttggggggtagaggcaggaaatgggaaccgagctgaagcagaggctgagttagggggctagaggacagtgctcctggccacccagcctctgctgagaaccattcctggga

SEQ ID NO: 2231 - DNA, 516 bp, Homo sapiens
accatttgcctcccgggctcaagcgattctcctgcctcagcctcccaagtagctgggattacaggcacctgccaccatgcccggctaatttttgtaattttagtagagacagggtttcaccatgttgcccaggctggtttcgaactcctgacctcaggtgatccacccgcctcggcctcccaaagtgctgggattacaggcttgagcccccgcgcccagccatcaaaatgctttttatttctgcatatgttgaatactttttacaatttaaaaaaatgatctgttttgaaggcaaaattgcaaatcttgaaattaagaaggcaaaaatgtaaaggagtcaaaactataaatcaagtatttgggaagtgaggactggaagctaatttgcattaaattcacaaacttttatactctttctgtatatacattttttttctttaaaaaacaactatggatcagaatagccacatttagaacactttttgttatcagtcaatatttttagatagttagaac

SEQ ID NO: 2232 - DNA, 324 bp, Homo sapiens
cacctgtccaaaaaggccttcgatacgggataatcctatttattacctcagaagtttttttcttcgcaggatttttctgagccttttaccactccagcctagcccctaccccccaattaggagggcactggcccccaacaggcatcaccccgctaaatcccctagaagtcccactcctaaacacatccgtattactcgcatcaggagtatcaatcacctgagctcaccatagtctaatagaaaacaaccgaaaccaaataattcaagcactgcttattacaattttactgggtctctattttaccctcctacaagcctcagagt

SEQ ID NO: 2233 - DNA, 324 bp, Homo sapiens
acaacagctccaagacaacacttaattccagctatgcgtggcaaaagatgttatggcagggaatagagaggtttaaatacagatgaaataaagggtcaccatctcctcaggcacaaggaacagcttactttttgccagatttcttaattccacctgtggccaagggccccttccccgcggccttcgcttttagctcctcgagtttcttctgctcctctttttgtttctgcttgaaagccttatcttcctcgtccatctccttggcctgcttcttgggctgtttcagtggcttcttcttgccaccttcgcggccggacatggcgc

SEQ ID NO: 2234 - DNA, 520 bp, Homo sapiens
accgtcccctttcacagatgagaaaactgaggcttttaatgggatatgctcaaagggtaaaatcctcacttagcatttgggaggttctgtgatttgattaatacctaattttcctgcctgtaagtctttgtgggaaaggttttatgaacaaatgcctaatgtttgctgttgctttgtgttaggctataagctctatgagggcagggcagtggctgctttgtccactagcatgccttaaatcagtatttgatgactaaatgaatgacagcgagagagcaagtaagcagaggagcaggaatcaacacagtccatacttccccacgttgccaggctgccagtgtgaatacacactgaaatttctaatgtggcaaggggaaaccatttaatccaccatttcccagttgcaacagcgttaacaaatattagcattccttaaaattttaataggaaatattttttaaaaatagagtcaagttcacaagtttagaaaatgctataaattccacactccctccccctt

SEQ ID NO: 2235 - DNA, 317 bp, Homo sapiens
gtgctgctaaccagggccagatattcgaagcttacaacatggcagctttgtggaaattaccttgtattttcatctgtgagaataatcgctatggaatgggaacgtctgttgagagagcggcagccagcactgattactacaagagaggcgatttcattcctgggctgagagtggatggaatggatatcctgtgcgtccgagaggcaacaaggtttgctgctgcctattgtagatctgggaaggggcccatcctgatggagctgcagacttaccgttaccacggacacagtatgcgtgaccctggagtcagttaccgt

SEQ ID NO: 2236 - DNA, 107 bp, Homo sapiens
  misc_feature 95, 96: n = A,T,C or G
acaagcttttttttttttttttttttttttttttttctttttttttttttttttttttttttttttttttttttttttttttttttttttgggcnntaaaaggggta

SEQ ID NO: 2237 - DNA, 304 bp, Homo sapiens
actccgtgtggagcgtgacacagtctctctcactgaactctcccaaaaagcctccaaggagggtattatgacaacaacttgacagggaaagaaactgaatgccaggacgtgcagcgggaagtggcagaatctgaaccagactgacagtcaaggtgagtagcaataaaatgctctaaatggaagtctggagctcatgctgccttggcccaaattcttccgtgccatttatcagctgggattactggggaaatgatatgatttctctacgccttggttccccaatccctaaaacggggattacagt

SEQ ID NO: 2238 - DNA, 484 bp, Homo sapiens
cgcccgcggtcctccgtcggttctctcgttagtccacggtctggtcttcagctacccgccttcgtctccgagtttgcgactcgcggaccggcgtccccggcgcgaagaggctggactcggattcgttgcctgagcaatggctgccatccggaagaaactggtgattgttggtgatggagcctgtggaaagacatgcttgctcatagtcttcagcaaggaccagttcccagaggtgtatgtgcccacagtgtttgagaactatgtggcagatatcgaggtggatggaaagcaggtagagttggctttgtgggacacagctgggcaggaagattatgatcgcctgaggcccctctcctacccagataccgatgttatactgatgtgtttttccatcgacagccctgatagtttagaaaacatcccagaaaagtggaccccagaagtcaagcatttctgtcccaacgtgcccatcatcctggttggg

SEQ ID NO: 2239 - DNA, 258 bp, Homo sapiens
actattttacctatgacccgtggattggcaagttattgtatcttgaggacttcttcgtgatgagtgattatagaggctttggcataggatcagaaattctgaagaatctaagccaggttgcaatgaggtgtcgctgcagcagcatgcacttcttggtagcagaatggaatgaaccatccatcaacttctataaaagaagaggtgcttctgatctgtccagtgaagagggttggagactgttcaagatcgacaaggagt

SEQ ID NO: 2240 - DNA, 115 bp, Homo sapiens
acaggggagaggttacggagtgggtgtgtgcagggcctggtgggaatggggagacccgtggacagagcttgttagagtgtcctagagccagggggaactccaggcagggcaaatt

SEQ ID NO: 2241 - DNA, 482 bp, Homo sapiens; identical to SEQ ID NO: 1898

SEQ ID NO: 2242 - DNA, 325 bp, Homo sapiens
  misc_feature 52, 61, 120, 127, 143, 157, 207, 237, 255, 277, 286, 303: n = A,T,C or G
tttttttttttttttttttttttttttattttttttttttttttggctctanagggggtanagggggtgctatagggtaaatacgggccctatttcaaagatttttaggggaattaattntaggacnatgggcatgaaactgnggtttgctccacanatttcaaagcattgaccgtagtatacccccggtcgtgtagcggtgaaagnggtttggtttaaacgtccgggaattgcatntgtttttaagcctaatgnggggacagctcatgagtgcaanacgtcttgngatgtaattattatacnaatgggggcttcaatcgggagt

SEQ ID NO: 2243 - DNA, 417 bp, Homo sapiens
acatttacagtatttgctgctgttcattccccaaaatacaattaggacataattggctattaaaaatttataaaatttaataaaaaactttgctatgaatgtagtgttacccacttttgcattaaattcaccttcataaatcaaaacatcatgactctcattcttaaattaaatgacccaaaattagaagttccaaaaaagttctgagaacaattatggtttaaaacaacaaacctaaatttttaaaatggacggcaatttttcctgtttcctcctttggcattcttgtattgggacaagcaaatacgccaatgctgaattatctgttaaacataagggccacaattactacaaaattatttcttctaaattccaaatatacccattatgaacagtcacctaattagagaaaactgt

SEQ ID NO: 2244 - DNA, 532 bp, Homo sapiens
caccttcctgttctaccttgtcgaaacagaagacaaatcattctttgtaagaacaaagaaccttctgaggaaaggaggccatacagaaattgaacctcagcacttctgtcaagctttccacagagagaatgatacactaatcatcatcatcagaaatgaagatatatcatcacatttgcatcagattccttctttgctgaagctgaagcatttccccagtgtcatctttgctggagtagacagccctggagatgttcttgatcacacctaccaagaactgtttcgtgcaggaggctttgcgatatcagatgacaagatactagaagctgtaacattagttcaactgaaggaaattatcaaaatcctggaaaaactaaatggaaatggaagatggaagtggttgcttcactacagggaaaataaaaagctaaaagaagatgaaagagtggattcaactgcacataagaagaacataatgttgaagtcatttcagagtgcaaatatcattgaattgcttcattatcaccagcgt

SEQ ID NO: 2245 - DNA, 357 bp, Homo sapiens; identical to SEQ ID NO: 1467

SEQ ID NO: 2246 - DNA, 486 bp, Homo sapiens
acgtccttcttggggcagatgtctgagataaactattccacgcccccagccaaaccacagcagttcaactacagcgagaaggcagggatggggatgagagaaacaaattttaagaagacgattagaatgtttgcactggtctggtgcagtcagcaccctgtgtgcagacacaatccggagaaagcgcaggagggtgtctttgccaaggcgacataccgcatagtggatggctttcagcgtttcccgctggggctcatccttggttttcagcttgttgtaggtgtccttgtaaaactcctggacttccttaatcacctacaatgggcagacgagagaggggcagagacggcattttcacatcttcctccacgaacaaatgttatgcgttccatcttgttctctctaagctctcagccaccagatgcctgtgcttggacaacgtcactgggcagatggcagctgctagcactgccttctctcagggcc

SEQ ID NO: 2247 - DNA, 208 bp, Homo sapiens
acacaactatttaaaatatcgtataaaattaccctcaggctatgtggataaggtgtaactgacacatcaatgaattttgtgtttaggctcgggtcctattcccaaaatatctcattatgtatatgcaaacattccaaaatctgaaaataatctaaaatttgaaacacttctggttccaagcattttggataagggatactcaacctgt

SEQ ID NO: 2248 - DNA, 384 bp, Homo sapiens
  misc_feature 181, 182: n = A,T,C or G
acatgcttcaggactacatatgacccagagagcaaggtggctgaactatagtctggaagccctcaggtaaagaggcacatctcaccactcattggttaaacaatgcatcatagcgagcacttttcctttccctggagaatgggatgtgaagcagtagaccgcagccacgccgatggttatnnagtgaagaagacttcacctcttcctattgagtttgcttggaatgctgacagcatcaggcaactctgaactgaacatttgctttgtcagaaaatatctttttttttactttgaagtttggcaaccttcatgttaccccaaagcaaaaccattgtgtcaggagtcaaacaaatgtttagaaagcaaacatgacgtctctattgt

SEQ ID NO: 2249 - DNA, 402 bp, Homo sapiens
  misc_feature 318: n = A,T,C or G
actcagcgagagagcaggaccagcctccctctgtgttactggtaggcaccttcttaaacatgttgtaaatgagatcgacgagggcccaaaagagaagggaagaacggtaagcggaatagtccttcactgccttatctgtcagcctggtggctccacctggagccactgcccgagcctgcgaggtcaccaacagcctccgcaagatttccacacgtgtggctctccactgctcagggggcaggatgtgaagggccaagactgtgaaatagtagggcccgtccacttcaaaggcactctccacccacttctccttgggcngttccagaaagccttggaggttcttctcttctcgggaagttgctcgggttgtgttcaggacgtaaagcacagtgtgaatgatgt

SEQ ID NO: 2250 - DNA, 273 bp, Homo sapiens; identical to SEQ ID NO: 1638

SEQ ID NO: 2251 - DNA, 221 bp, Homo sapiens
acggccagggctattggttgaatgagtaggctgatggtttcgataataactagtatggggataaggggtgtaggtgtgccttgtggtaagaagtgggctagggcatttttaatcttagagcgaaagcctataatcactgcgcccgctcataaggggatggccatggctaggtttatagatagttgggtggttggtgtaaatgagtgaggcaggagtccgag

SEQ ID NO: 2252 - DNA, 402 bp, Homo sapiens
actgtgctgtgaattgtatttgcttcaaagtgtgggacgtttcacagggtgagaatggtcaagtagtgagaccaaatgcctatatcgattcaaagagtgggagtccagaaagttccctacaggctgggggcccaacccttaccacagctccctctggctcacacacagtaattaatagaggattcaagaacagaccccaactttgaaacagctgcagaaaattcatcctgctttcagaggccatgcagtgacacatacatctctcttggcagatttgcatcataaactacagagctgtaactgctacaatataaacgacactgactatgcccactgggggacaattagacatttgcattgcttagaacacatctaggaaccagggactgactgctggaaagt

SEQ ID NO: 2253 - DNA, 301 bp, Homo sapiens
acagtgatttcgcatcttagctggtaatcaaagatggttatgtattaagtaagagaagacatagtctctcttccaggtatcacctgtcagaaacctgggcaaatttaattttaagaactagaactgcatctcctggtggcagtcgtcaccctgagaacaggaacaaggcaaagaaagcatacaggattttgattctcctacacaggtgcacataaagttagtttattaatgactatattttgaagccagccattttgtccaatatttaaataacaagctgtttaatattaaagcagaaagt

SEQ ID NO: 2254 - DNA, 495 bp, Homo sapiens
acatctataaaaggaaaagtgatggcatctatatcataaatctcaagaggacctgggagaagcttctgctggcagctcgtgcaattgttgccattgaaaaccctgctgatgtcagtgttatatcctccaggaatactggccagagggctgtgctgaagtttgctgctgccactggagccactccaattgctggccgcttcactcctggaaccttcactaaccagatccaggcagccttccgggagccacggcttcttgtggttactgaccccagggctgaccaccagcctctcacggaggcatcttatgttaacctacctaccattgcgctgtgtaacacagattctcctctgcgctatgtggacattgccatcccatgcaacaacaagggagctcactcagtgggtttgatgtggtggatgctggctcgggaagttctgcgcatgcgtggcaccatttcccgtgaacacccatgggaggtcatgcctgatctgt

SEQ ID NO: 2255 - DNA, 482 bp, Homo sapiens
actttgaatgtatcattctttcctggcttgtaaggtttctgctgagaaattcactattagcctgataaggttttctttacaactgactaggcacttttctcttgcctttttcagaattctgtctttgactttagatagtttgactataatgtgccaaggagaagactttcttgcattgtatatgtttgcggatcttggagcctcctgtttctggatatctaaatcatttgatagatttgggaagttttcatctattatttaataacaaaaaaatagatgagttttccaatccttttgttctctgtcttctgggacccaaatgattcaaatatgtggtggcttatagtatcccatatgtctcgaaggcttcaattattcttttttattcttttaacattatttctgtctgattaggttattttgaaagacctgtcttctgtctttgagttgtcagattccttcttctgcttaatctagactat

SEQ ID NO: 2256 - DNA, 460 bp, Homo sapiens
accgcttccactacatcaacatcctgtcgaggctgccagagactctgccatccctggaggaggacacgctgggcaacttcatcttcgcctgccgcttcaaccaggaattactctcacttccaccacccgatgtatggaaactgctatactttcaatgacaagaacaactccaacctctggatgtcttccatgcctggaatcaacaacggtctgtccctgatgctgcgcgcagagcagaatgacttcattcccctgctgtccacagtgactggggcccgggtaatggtgcacgggcaggatgaacctgcctttatggatgatggtggctttaacttgcggcctggcgtggagacctccatcagcatgaggaaggaaaccctggacagacttgggggcgattatggcgactgcaccaagaatggcagtgatgttcctgttgagaacctttacccttcaaagt

SEQ ID NO: 2257 - DNA, 233 bp, Homo sapiens
  misc_feature 38, 150, 205, 233: n = A,T,C or G
acaagcttttttttttttttttttttttttgtctctanagggggtagagggggtgctatagggtaaatacgggccctatttcaaagatttttaggggaattaattctaggacgatgggcatgaaactgtggtttgctccacagatttcanagcattgaccgtagtatacccccggtcgtgtagcggtgaaagtggtttggtttanacgtccgggaattgcatctgtttttaan

SEQ ID NO: 2258 - DNA, 292 bp, Homo sapiens
cgaggtcgcacgcgtgagacttctccgccgcagacgccgccgcgatgcgctacgtcgcctcctacctgctggctgccctagggggcaactcctcccccagcgccaaggacatcaagaagatcttggacagcgtgggtatcgaggcggacgacgaccggctcaacaaggttatcagtgagctgaatggaaaaaacattgaagacgtcattgcccagggtattggcaagcttgccagtgttttttttttttaaaccctgttcttgggtgggtgtgggtataatactaagctgag

SEQ ID NO: 2259 - DNA, 500 bp, Homo sapiens
atcagaacctcagctcctccctctctgcctcttacagcatgcatataccaaacacacatcaacctcagggcctttgcacttctatgttacacatggaaggctgttgcacaagctctctgcatgaccttttccctcatatcctttaggtcgtggaatcagagaggtctcctatgaccaccttgtatcaaattgcaaattattcccaagtccatacatctatctccatttcttaacctgcatcatttttctccatagcatttatcatctctgttttgtttggttcactagcacatactcaaaggtgccaggcatgcagtaggtgctcagtaaatattgtttaaatgagtggatgcatgaataaaaaagagaattataggaaataggtcaattaaacggctctcatttttctccttagcagagtcacctgatatgaaaaaggagcaagacccccctgccaagtgccacaccaaaaagcacaacccgagagggactcacttatg

SEQ ID NO: 2260 - DNA, 242 bp, Homo sapiens
acttttcaatttatacatttgttagtatcttgtggctggcttcatagtataagactcactcttaagcctactatagagcctacagcactatcagaagttttcaattaatagctatggatcagaaaatcctgcgatcagtttctcataccataaaatcctaggcttttttaccattgatttcacctttcgagcacagtcactgcatggcaaatgtatgaaacagacgtttacagcaaataagt

SEQ ID NO: 2261 - DNA, 347 bp, Homo sapiens
actacattttataacaatagagagtagctgaaaatactacatgctaacacagataatatgatacacaacctcaggggggaagctggcagggagcacgtggcagaggccacaggtttagactaagagcctttcaatggactgctgaatggattggatctgctgtttcagctgcgagccttctttgatggtgacagaacaggcgatgacaggcctggagaccccacaggctctccccagggcctgcttggagcgcacaaacacgtagggcacattcttgtcttcacacagcggcggcaggtgcagaatgatctccagtggctcggcgtctgcagccatcacgatgaact

SEQ ID NO: 2262 - DNA, 331 bp, Homo sapiens
  misc_feature 50, 55, 67, 74, 106, 133, 149, 172, 184, 203, 207, 228, 243,261, 277, 283, 288, 292, 302, 309: n = A,T,C or G
acaagctttttttttttttttttttttttttttttttttttttttttttnggctntaaagggggtanagggggngctatagggtaaatacgggccctatttcaaanatttttaggggaattaattctaggacnatgggcatgaaactgnggtttgctccacaaatttcaaancattgaccgtantatacccccggtcgtgtancggngaaagtggtttggtttaaacntccgggaattgcatntgtttttaagcctaatgnggggacagctcatgantgcaanacgtnttgngatgtaattnttatacnaatgggggcttcaatcgggagt

SEQ ID NO: 2263 - DNA, 291 bp, Homo sapiens
actttcaaaagagggctttccagggctcagctcccaaccagctgttaggaccccacccttttgcctttattgtcgacgtgactcaccagacgtcggggagagagagcagtcagaccgagctttctgctaacatggggaggtagcaggcactggcatagcacggtagtggtttggggaggtttccgcaggtctgctccccacccctgcctcggaagaataaagagaatgtagttccctactcaggctttcgtagtgattagcttactaaggaactgaaaatgggccccttgt

SEQ ID NO: 2264 - DNA, 494 bp, Homo sapiens
accttggatctcagggactctgggtcctagggactcggtggggcgcgtctcagcagtggtgtgcacggcttgggctgagaggcccttcctcagatcccttccttcctcacccctacccattcctttgcagttgtccgaacagacagcctgaaggggcggcggggccggctaccttcaaaacccaagcagcccccagatgcctcccctgccaatctcctcacttccctggtccgtgcacacctggactcagggcccagcactgccaaactggactactccaaggtgaggtcccaccccgtgtctgccttggggaggtctatgagcacatgcagtgcctttgtgcgtgttaggagagctaccccctctggaaggactgaatgagaaaggaggtttaaaaaagaaagaaagaaaagcgactccctccagttcgacagatcaaagagaggatccccctctcggctgaccagatgggaaaatgcaccccctcaggcagg

SEQ ID NO: 2265 - DNA, 440 bp, Homo sapiens
acaataaatataaggaagctaaaacaccaatgtggaattcctgtttccagataacatgtatattcttctatagagtgacaggatcaattgcataagcgcaaagccttaaattgctggtttagagaagacccttttttcattcagattctttgttcgtagagcagttatttgaaaaacagttatggaacacaaaacattttatagatttaatatcataacattgcaaatttttcttgtattattgttcacaccactggttatactttttttttccttttttattgattgggcctgaatacaggctttctagagatctttttcattaatacttttaaatacctttcaggtagttacatcatgtttcttcattggatttgtaaaacttgaagccataaaaatattagtttggtgtgtattggggaaaatagctaaaagtctaa

SEQ ID NO: 2266 - DNA, 316 bp, Homo sapiens
ccttaatcagccctctgtgacataggtagcagcccacggagatcctaagctggctgtcttgtgtgcagcctgagtggggtggtgcaggccggtagtctgcccgtcactttggatcatagccctgggcctggcggcacagcagcacttgcgttctcggggctgtcgatttcctgccacctgggcagataacctggagatttccaccttttcttttcagcttgattgcatttgactatattttacagccagtgattgtagtttcatgttaatatgtggcaaaatatttttgtaattattttctaatccctttctgagt

SEQ ID NO: 2267 - DNA, 497 bp, Homo sapiens
  misc_feature 458: n = A,T,C or G
accaaggagaacatatactttgaaaagggggctaaaacatgtagctatacaatctggggttcttatcgattgatggatagattgattgagacagagtcttgctctgttgcccaggctggagtgcaatggcgtgatatcagctcaccgtgacctccaactcccaggttcaagcaattctcctgcctcagcctcctgagtagttgggattacaggcgcccaccaccatgcctggctaatttttgtatttttagtagagtcggggtttcgccatgttggccctgctggtctcgaactcctgacctcaggtgatccgcctgctttggcctcccaaagtgctaggatcacaggcgtgagccaccgtgcccggtgctgggattctaattcaacaatttttcttggtagtcttgccaacagtaattggagaaacgtgttcctaattgttggtggggagaggattnaaggtaagcacacacattttaatacacattcaatgtctg

SEQ ID NO: 2268 - DNA, 342 bp, Homo sapiens
acctggagcggagggtcaggcacaggtaggaacggggctcacaggccgagcagagccccctctggcccctactcaattccttcctgcttgtcttttatggccacccgaaagcgctcctccagcagggacagctcactgatgaggtcggtgatggcgttggtaaaggcttcctgggggctgtagtccggcgtggtctgcactcggatgatgatcttgtgctccaaggggtgggggactttgtagccagcaaatagcacttgcgggtcttttaggagttgtgatttaatgatgtttcccagtgtgtggtcttctttgttgatggtgaataaacaggcattgggt

SEQ ID NO: 2269 - DNA, 159 bp, Homo sapiens
cggccgaggtacaaaaaaaaccttacataaattaagaatgaatacatttacaggcgtaaacgcaaaccgcttccaactcaaagcaagtaacagcccacggtgttctggccaaagacatcagctaagaaaggaaactgggtcctacggcttggactttcc

SEQ ID NO: 2270 - DNA, 379 bp, Homo sapiens; identical to SEQ ID NO: 1969

SEQ ID NO: 2271 - DNA, 71 bp, Homo sapiens
acggtggcggggaggacgactaggcggcctgcctgcagggctggggaccaaacgtcaggccacagagcatc

SEQ ID NO: 2272 - DNA, 117 bp, Homo sapiens
acctgcacggtcacccgctccgtgtgtcgccctatattgagggctcaagctttcccttgttttttgaaaggggtttatgtataaatatattttatgcctttttattacaagtcttgt

SEQ ID NO: 2273 - DNA, 209 bp, Homo sapiens
acagtttggctaggtatcattcaactctccaatgttctattaatcacctctctgtagtttatggcagaagggaattgctcagagaaggaaaagactgaatctacctgccctaagggacttaacttgtttggtagttagccatctaatgcttgtttatgatatttcttgctttcaattacaaagcagttactaatatgcctagcacaagt

SEQ ID NO: 2274 - DNA, 427 bp, Homo sapiens
  misc_feature 34, 66, 69, 72, 102, 154, 196, 207, 244, 264, 286, 370: n = A,T,C or G
tttttttttttttttttttttttttttttttttnggccgtttccacacctgccctttattggtctnttntancaaagtggctccaggcccttcacgcctttnaaacaccacccatgagggtttaggaaggtgccatcattctgtgaaggcccanagcttacccaagtcttggagcccaagttgaatcaccaaccanagggttggganaggaaaaggaaacaggcagaggggaaaggcaaggctntgcagtgaaggggactgatntcaagggaatgctgaggtccancagtgtctcctgaaggcatgctgcatcctaaggctcctcaggactggatggagtaggaaatctgtgtgttgagcagttcacatntatatggcaactttaaggaggcgcttgatgtcaggctcaatgttgatggttgggaag

SEQ ID NO: 2275 - DNA, 153 bp, Homo sapiens
caacccaacacaggcatgctcataaggaaaggttaaaaaaagtaaaaggaactcggcaaatcttaccccgcctgtttaccaaaaacatcacctctagcatcaccagtattagaggcaccgcctgcccagtgacacatgtttaacggccgcggt

SEQ ID NO: 2276 - DNA, 403 bp, Homo sapiens
ggttctgcaagtcagagaactgtaaccacatgctgggccttagagcaatcttagggcacctgcttttctcctgcctacccattttatagaaaaaacaagagaggctccttccgtggctggtagcacagggcaaagtaaggaaagggatgtgccagcagtgggtttgaatgaggatctgggtgaccagcggtgaatgtatgttgtctgttagtccagaatctacatgctgggcacattagggatccctctggggaggggcgcctttggcttgccttgtcggtgtgagccgagcacgcgtgcttgtttcaatcctgaccgccggtcaatttgtggaacaagtcctcatcgagtgtttcattctggtccttggagcgggtggacaagaaaatgtagccgccaatgt

SEQ ID NO: 2277 - DNA, 362 bp, Homo sapiens
accgttgcccatgcggggattaatgtgcagagctatgtcccctgaggagcccaccttgaagttgatagcaaagctcttgcctgtgggaggcacatagcccttgatgatgatggttcttcgagctgtgagccctccttgcagcctcccgaaatatggcacaggcgggttgaaggttgggggtccttccatggtgggcaggctgttcagctgttgatggcaatgtccgggaccagggtaaagtggcatcatcgggggtccctggggccggaggggctggcctccgatgaagttgattgattgaagttgcagatccccatccacttgcaggtgggtgaccatctgtaggggaagccggtgcccgt

SEQ ID NO: 2278 - DNA, 204 bp, Homo sapiens
accagctggggtagtaactagtagagactgacccagaggtcaagccacaagtgagtgtgactgtccctccaggggacactgagaacgatggctcctgggtcaccacagtctgagaatccactcctgatccataagcaaggagtccgaggagaagcatcatccaggccatggtggggacactcatgaaggctaagtgttctcagg

SEQ ID NO: 2279 - DNA, 470 bp, Homo sapiens
accagtaaggctggatcttacagagaaagactatgaaatacttttcaaatctattaatggaatccttttccctggaggaagtgttgacctcagacgctcagattatgctaaagtggccaaaatattttataacttgtccatacagagttttgatgatggagactattttcctgtgtggggcacatgccttggatttgaagagctttcactgctgattagtggagagtgcttattaactgccacagatactgttgacgtggcaatgccgctgaacttcactggaggtcaattgcacagcagaatgttccagaattttcctactgagttgttgctgtcattagcagtagaacctctgactgccaatttccataagtggagcctctccgtgaagaattttacaatgaatgaaaagttaaagaagtttttcaatgtcttaactacaaatacagatggcaagattgagtttattt

SEQ ID NO: 2280 - DNA, 608 bp, Homo sapiens
acggtaaagattctaacactgataaacatttggagcccctgaaatcattgggaggccgaacatccaaaaggaagaaaactgaggaagaaagtgaacatgaagtaagctgcccccaagcttcttttgataaagaaaatgctttcccttttccaatggataatcagttttccatgaatggagactgtgtgatggataaacctctggatctgtctgatcgattttcagctattcagcgtcaagagaaaagccaaggaagtgagacttctaaaaacaaatttaggcaagtgactctttatgaggctttgaagaccattccaaaaggcttttcctcaagccgtaaggcctcagatggcaactgcacgttgcccaaagattccccaggggagccctgttcacaggaatgcatcatccttcagcccttgaataaatgctctccagacaataaaccatcattacaaataaaagaagaaaatgctgtctttaaaattcctctacgtccacgtgaaagtttggagactgagaatgttttagatgacataaagagtgctggttctcatgagccaataaaaatacaaaccaggtcagaccatggaggatgtgaacttgca

SEQ ID NO: 2281 - DNA, 473 bp, Homo sapiens
  misc_feature 421: n = A,T,C or G
actgtctccctcacggtgaatgagcctcctggtgtttcgtccaagaaaagaaagggtgtcactggaaccacagccctttttcattttataaactgcctcttcatgttgcctgctcaagtttccacctagaattgctatcactgtggctctttctaaaaatctttctatttaactggttcactgaaattagtcatagaaaacttgtgatttggtgaagaggcattccttgtaataaccaaatgacttgggatggtgtgcatagcaagggcagtgttacacttatgaggactgtctctagcatccaggaagtctctgggtctgagggatggaaagttcttcctgctatgaatgagagtggactcttcccctcacccccaactgaaaccacaaacaaccagaatcttctggaattctgacttanagtcgttgttatagaagaccttgttgctatggaacatgaaactgtgtgtcag

SEQ ID NO: 2282 - DNA, 585 bp, Homo sapiens
  misc_feature 569: n = A,T,C or G
acaaccacagtgctttcttcaaatcatatgagaaatactatgcatagcaaggagatgcagagccgccaggaaaattctgagttccagcacaattttctttggaatctaacaggaatctagcctgaggaagaagggaggtctccatttctatgtctggtatttgggggttttgtttgtttttgctttagcttggtgaaaaaaagttcactgaacaccaagaccagaatggatttttttaaaaaaatagatgttccttttgtgaagcaccttgattccttgattttgattttttgcaaagttagacaatggcacaaagtcaaaatgaaatcaatgtttagttcacaagtagatgtaatttactaaagaatgatacacccatatgctatatacagcttaacccacagaactgtaaaagaaaattataaaataattcaacatgtccatctttttagtgataataaaagaaagcatggtattaaactatcatagaagtagacagaaaaagaaaaaaggactcatggcattattaatataattagtgctttacatgtgttagttatacatattanaagcatatttgcctag

SEQ ID NO: 2283 - DNA, 511 bp, Homo sapiens
gaccaagaccaagaagcgccctcagcgtgcaacatccaatgtgtttgctatgtttgaccagtcacagattcaggagttcaaagaggccttcaacatgattgatcagaacagagatggtttcatcgacaaggaagatttgcatgatatgcttgcttcattggggaagaatccaactgatgagtatctagatgccatgatgaatgaggctccaggccccatcaatttcaccatgttcctcaccatgtttggtgagaagttaaatggcacagatcctgaagatgtcatcagaaatgcctttgcttgctttgatgaagaagcaactggcaccatacaggaagattacttgagagagctgctgacaaccatgggggatcggtttacagatgaggaagtggatgagctgtacaactatagatttcatgatgtatcgttcaataaggtgactttaaaatgagacgaaaatcattaaacgtatctttgttttatcctgtatttaaataatatatcatgt

SEQ ID NO: 2284 - DNA, 516 bp, Homo sapiens
gtttaaatcaagattatgatgagtaaatgtgtatgggttaaatcaaagataaggttatagtaacatcaaagattaggtgaggtttatagaaagatagatatccaggcttaccaaagtattaagtcaagaatataatatgtgatcagctttcaaagcatttacaagtgctgcaagttagtgaaacagctgtctccgtaaatggaggaaatgtggggaagccttggaatgcccttctggttctggcacattggaaagcacactcagaaggcttcatcaccaagattttgggagagtaaagctaagtatagttgatgtaacattgtagaagcagcataggaacaataagaacaataggtaaagctataattatggcttatatttagaaatgactgcatttgatattttaggatatttttctaggttttttcctttcattttattctcttctagttttgacattttatgatagatttgctctctagaaggaaacgtctttatttaggagggcaaaaattt

SEQ ID NO: 2285 - DNA, 341 bp, Homo sapiens; identical to SEQ ID NO: 1855

SEQ ID NO: 2286 - DNA, 346 bp, Homo sapiens
accctagggccccttatcagtgggctcctgatctactgcccccacagcctcaaccgcggggatggggtggggcaggtcaagcctgagaacagtccactttcaaggacttcccaggcacccataggagacctgaaacctataaagagaagtctagatttaagggggcctaagtcccagagtccaggtttggagggctcgggtctagagccctgatttggggagaggactcagtctgggaacccagactgcaggggagagggtgaattctggagtccaggtgtggggagggggcttgactcatggaggctctgtaagagcccaggattgggggcctgggtcagggagt

SEQ ID NO: 2287 - DNA, 357 bp, Homo sapiens
accattcagttcagctgcaggtataggcagtgacaagtatccaattcttagaagaatcacttactcccacaatctgtccagacacattaatctaaggacaagtttataaatagcaaacgtgattttcacattgcagtgttctcaagaatgtatatacaagtgtgtagtcctgttgatgggatgtttccccgagttctttctattgatgcgttcatgctcttgaccctggtagagacagttctttctttccacagagcagattttcttttgtcatccaccatttacaatactctgtgaattagtattacttattacatttatgaaacggcaatatttggattgtaatagctcttcagt

SEQ ID NO: 2288 - DNA, 420 bp, Homo sapiens
ggatatagtattcctggtcatttaagaatgttcattcattgaagccggagctgtctctgccacaggagagccacatggtcggtagtaaccagggcctctccaagcccagctgtgagtcactgcccagtgagtcccgcgcttcctttaaggtgctgggagcaaagagagggtgactgaggcagaccccaacccctgctctgcaccatctgggccctcgccgtgtttgaacctggctgaatgagtggagggcgctgtgttctcaatcagcgcctccgaggagccgtggggttccttcggcattagttcacggtttttgagagaggccttagttactgcagtgaatttctttcctgttgcaaagacgcttccagcctcactttactttctgtggcctgatgaggaccatgggtgattttgtgt

SEQ ID NO: 2289 - DNA, 512 bp, Homo sapiens
cttttcctaacactcacaacaaaactaactaatactaacatctcagacgctcaggaaatagaaaccgtctgaactatcctgcccgccatcatcctagtcctcatcgccctcccatccctacgcatcctttacataacagacgaggtcaacgatccctcccttaccatcaaatcaattggccaccaatggtacctgcccgggcggccgctcgaaagggcgaattccacctcagagccccaaaaatcgtttaaatgatgtggaagcgatcgtcaatatcacctgtaacgatgggctttctcatatgcacaccatagtgttcaggagacacggaaaggtatcaggcagcctgctaacgagtggtttaatcacgaattagtacgtaaaatcggtaacggctggaaatcattcaatactcacactatcgaaagttccccagccaaccgcggtacgttcttacatacgatgtaccgctgttctctttacgatttttagctgtactggtgaattatgag

SEQ ID NO: 2290 - DNA, 128 bp, Homo sapiens
acctgctacctgcttcatagccctggtttgggcagcggatccgacacgagatacagacagaccaacgttaattgcagggcggatacctttgtagaacaattctgtttccaagaagatctgtccgtcag

SEQ ID NO: 2291 - DNA, 178 bp, Homo sapiens
actttatttaaaaaacaacttgaggcagcaaaagtattaattacaattgtctgactttatctgtgtgatgtgcggggcctccctgtctcctgatctcagtaagcctacaccgaccgtttcaaataggcttagttctaaagagactgtggtttggaaaacatttccaaatagctgcagt

SEQ ID NO: 2292 - DNA, 509 bp, Homo sapiens
  misc_feature 41, 62, 85, 99, 173, 185, 230, 235, 240, 249, 264, 278, 291,318, 328, 341, 352, 367, 376, 389, 403, 416, 436, 450, 454,474: n = A,T,C or G
acaagcttttttttttttttttttttttttttttttctttngtttttgaaacagtctcactntgttgcccaggctggagtgcagnggcgggatctcggntcatggcaagctccacctcccatgttcgcaccattctcctgcctcagcctcctgagtagctggggctacaggcncctgccagcacncctggctaattttttgtatttttagtaaagacagggtttcaccgngttanccagnatggtctcnatctcctgacctcgngatccgcctgcctntgcctcccaaagngctgggattacaggcgtgagccaccgngtccggcctntttttttcttttnttttttttganacaaagtctcactgngtcacccanactggaatgcagngacacaatctcggntcactgaaacctntgccttccaggttcaagctnttctcatgcctcancctntcaagtagctgggactacanatgtgggccaccatgtctggctaattttttttttt

SEQ ID NO: 2293 - DNA, 165 bp, Homo sapiens
accagagactctcctatctcacggttgaggcagacccaggatagaatagagaataaaaggaatgcttataggaaacaattttgtatggaatgctagatggccaagcctcagcctttggcccagtgcaacccttgcctcgcttgtcaacagtgaaaaattagtttg

SEQ ID NO: 2294 - DNA, 241 bp, Homo sapiens
actacaagttgagtaatggtatgagtatataccagaattctgattggcagcaagttttattaatcagaataacacttggttatggaagtgactaatgctgaaaaaattgattatttttattagataatttctcacctatagacttaaactgtcaatttgctctagtgtcttattagttaaactttgtaaaatatatatatacttgtttttccattgtatgcaaattgaaagaaaaagatgt

SEQ ID NO: 2295 - DNA, 129 bp, Homo sapiens; identical to SEQ ID NO: 2108

SEQ ID NO: 2296 - DNA, 477 bp, Homo sapiens
acatgtgttgttcaaaccttgttaaacctaatattgaactatttttatatctgctgtctttcagaaggcaaataggaaactatatatttgcttaaaaattggcatttagtaaccttaattctttttatagaaggaatgacttaaagtattgtcccctctttttgcactaattgtggatttttttagatgcttctcaaaattttcagtgtgtaagctaaacaaaaactaaaactaagaattctcaaaaagacttgttcaaaacagggaaagactgatgaaaagtaaaatggactacttttgtaacttacctgtttgttaggaaatggaatggtttctttgatttaaaatgaataaaaatagattattacgtcttttgtattgagactgtattgttatgagcctaggaaatttgggaacatgattgtattgtattaaaattcgaagtgattattatcagcttaattggattaaaaaagt

SEQ ID NO: 2297 - DNA, 102 bp, Homo sapiens
acataggactgtgaggagagacttcccgagaaaggatgttcgggctagcgttaagggtgagcgtgagttcaccagagaaggaaggggagaccagtccagggc

SEQ ID NO: 2298 - DNA, 231 bp, Homo sapiens
acaatatcttatgtttgacttataaacattatcccaaagcaacatcaaatacagttcaaaagcccaagaggaaagggggtaataagaaatcagaacactgaagaatgtttaaaacattgttttctaaacactaacaaaaaaaattaagggcaaactgaaaatacaaatgagatttacaggcactgtgtgtagaatgtgcaaaaattcacttagcttttcttttgttttttt

SEQ ID NO: 2299 - DNA, 302 bp, Homo sapiens
caagactgggacgtctagtccacaggaagacctgcaccactgtcgccttcacacaggtgaactcggaagacaaaggcgctttggctaagctggtggaagctatcaggaccaattacaatgacagatacgatgagatccgccgtcactggggtggcaatgtcctgggtcctaagtctgtggctcgtatcgccaagctcgaaaaggcaaaggctaaagaacttgccactaaactgggttaaatgtgtacaagcttttttttttttttttttttttttttttttttttttttttttttttttttt

SEQ ID NO: 2300 - DNA, 656 bp, Homo sapiens
  misc_feature 547, 610: n = A,T,C or G
actaaaataggcttttgcttgttttaaaagcaattctagatgaggttatatttttacaatactgtatctcatctcaaataaatttatacattctttaccctgtctaaacttgcatgcaaaataagaaccagcaagccttcaaacttcaatcacagtattccataggctatattttaagtctattgcattagttgaaatttattttgcagagtatgttaacaaacatattctaacacttaaaaaatcattacaattttttctgtttttgtcttctaaattactctgagcagtgaattactggagggaagatacccatgtctaaaatttgtgtctggtgccagtctcagatttctgccaaacaccagtaggtattcaaaagtgtggtccctttaaaacagcaggccggatatcacctttctgtcttcaaagattcaaaccagactcccaatctgggatttctctacagagggttggctacttcccagttaatgtgagttttgcaaagtttgcatttcatgaaaacagtggttgtgtaaacatatattgngtcactttacctactatttactaaaatcagagagtttagcctttgaaatttatgggttctctngagctatcataatcaatcagtcatacgaatggactagctgtagact

SEQ ID NO: 2301 - DNA, 299 bp, Homo sapiens
ttaagtaggtctacaagacgctacttcccctatcatagaagagcttatcacctttcatgatcacgccctcataatcattttccttatctgcttcctagtcctgtatgcccttttcctaacactcacaacaaaactaactaatactaacatctcagacgctcaggaaatagaaaccgtctgaactatcctgcccgccatcatcctagtcctcatcgccctcccatccctacgcatcctttacataacagacgaggtcaacgatccctcccttaccatcaaatcaattggccaccaatggt

SEQ ID NO: 2302 - DNA, 192 bp, Homo sapiens
  misc_feature 182: n = A,T,C or G
accaacacatgtcattcaaggagtagaagtttctagaataaggcaaaagttacagggcagcagttatgacctttaatagaactttgttacactgaaagatacagcctgccatacttgcagggaaaatgtctttcaagaagggtaacacccaatttcttccatacatttaaaaataacctaancttaaactta

SEQ ID NO: 2303 - DNA, 555 bp, Homo sapiens
acagcaaagcgacccttggtgtcatagatcagacggaaattctctcccgtcttgtcaatgctgatgacatccatgaatccagcagggtaggttatatcagttcggaccttgccatcgattttaatgaaccgctgcatgcaaatcttctttacttcatctcctgtcagggcatacttaagtctgttcctcaggaaaatgatgagggggagacactctctcaacttgtggggaccggtggatggacgaggagcaaacacaccggtcaatttatccagcatccaatgctttggagctgccacccgcttcagatgcttcttacctgcccgggcggccgcccgggcaggtcctgcttccagccatggtcaaccccaccatgtttttccacattgctgtcgatggcgagcccttgggctgtgtctccttcgaggtaaggggcctggataccaagaagtgactgctcatctaatccataaagctatgttaacagattggaggtagtagcattttcattacaagtgactaaaagaacagctgtttacccctgatcgtgcagca

SEQ ID NO: 2304 - DNA, 256 bp, Homo sapiens
acttggatttttgatgaagccagtgtttacgaaattaggacacagacatgttgttttgactccagttatttgtaaggcagccagttcatctgtcaaagttttatgaaatccaacagcagcaaacttgcttgaacagtaagccagtaagaaggggaccgaaacatgtccagctgccgaagccacagtgacaatatggccatggttattcttcgtcattgcaggaagaaatgcctttgtagtccagaaatgtgcaagt

SEQ ID NO: 2305 - DNA, 461 bp, Homo sapiens
acagacagaccccaagtgcagaatcaaattgccctaagtcagaacatggagcaaccgcaactccttcgcacttgtgcatgtgtgtgcgctcgcagacgcacacacacacacacatattctctctctcttatgcacacatccatccacatcccaacaattgcaggtgctaagtttggacataacccagggactcttccctgacttctgtcaggtcctggaaagaagaagtaataaatgaaaagcagctgggactgctcgatgcatctctcctcttccaacaatgacgcggagaaggcaagacatacactggggcagctacttccttggcacaaaaatgaacaggcaacaagaaggtcaaggaagtgtttaagttagtctcaggtttaaaccacttttcaacaccacaaaacagtagcaagcaggaaaaaaaaaacaaaaacaaaaacaaaaactctggccct

SEQ ID NO: 2306 - DNA, 334 bp, Homo sapiens
ggaatggatgcaccgcaaataatgcattttctgagttttcttgttaaaaaaaaatttttttaagtaagaaaaaaaaaaggtaataacatggccaatttgttacataaaatgactttctgtgtataaattattcctaaaaaatcctgtttatataaaaaatcagtagatgaaaaaaatttcaaaatgtttttgtatattctgttgtaagaatttattcctgttattgcgatatactctggattctttacataatggaaaaaagaaactgtctattttgaatggctgaagctaaggcaacgttagtttctcttactctgcttttttctagtaaagt

SEQ ID NO: 2307 - DNA, 532 bp, Homo sapiens
  misc_feature 482: n = A,T,C or G
tttttaaatcacattaattttaccaagtgaaaccaagccatactgtttttgagccaattaagaaaattgccatttttaaagtgtagcatttcagggtaaagacccatgaaatggcttgatgtattctagactactgaaagaaaaccacttcaaagattttgttgaaagttttagtgttgtctgaaatgcaagagggaaggtgattggtagtgagttaaaagaaaaagagaggaaaagagagtagttttgtcttcaagtaaaatgtctggttgtgccagacatttcacaagtgtgaaaggagataggagaagctcaacttgagggcgtgtagtaagttgtagaaggctcgaggggacgtggacttatttgccttggtttgcaatacctgcaaataatgagtttgaaaagaaacaatgaaatgtgttaaaaatttgaccatattagataaattttggtggatttagtcataagatggaaaaagnctggtgaatcttttattacaaaatgtttctgttaaatgggatcatcatct

SEQ ID NO: 2308 - DNA, 376 bp, Homo sapiens
actaacctgtatggactaggactataggaaaacctggaatttgagcattaaatttggccctgagcttactttcccaccctgaaagttctccaaggaaaatgcttgtgcaactgactgccaacccccccagattcctcacgtcccgcacccttctcattatctggcctgcatctctcctgcttcagcaccttctgactcgtttggcctcctggatgccattctccttgccatttttcttggactgggtgacccatgtctctccctttccctcagccttccttcagatcaaaccaccctgatcctcatgtttcttcctatctcctagatatttggcatgatcttcagtatgatcttgtgctgtgctatccgcaggaac

SEQ ID NO: 2309 - DNA, 462 bp, Homo sapiens
  misc_feature 451: n = A,T,C or G
acccaccctattgtgggggtggtggcttcttgctgtcccgcttcacggccgctgccctgcgccgtgctgcccatgtcttggacatcttccccattgatgatgtcttcctgggtatgtgtctggagcttgagggactgaagcctgcctcccacagcggcatccgcacgtctggcgtgcgggctccatcgcaacgcctgtcctcctttgacccctgcttctaccgagacctgctgctggtgcaccgcttcctaccttatgagatgctgctcatgtgggatgcgctgaaccagcccaacctcacctgcggcaatcagacacagatctactgagtcagcatcagggtccccagcctctgggctcctgtttccataggaaggggcgacaccttcctcccaggaagctgagacctttgtggtctgagcataagggagtgccagggaaggtttgaggnttgatgagtga

SEQ ID NO: 2310 - DNA, 230 bp, Homo sapiens
acgctgcttcttcagagcaatacgccgccgtttgtgttgcaggacacgtggagtagcaagacgctgaatcttgggtgctttggtcctaggtttcttaccttctttatttaagggctttcttacaacatactggcggacatcatcttctttagagagattgaaaagtttgcggattctgctagctcttttggggcccaggcggcgaggcactgtagtatcagtcagtccag

SEQ ID NO: 2311 - DNA, 339 bp, Homo sapiens
acaaaaagactctaaagaagctgtcaagaagaaggcagctgagcaaacagttctctcccttgcagctgcccgggaacaggcaaaggaggcgtgcaaagctgcagcagaacaggccatctccgtccgacagcaggtcgtgctagaaaatgctgcaaagaagagagagcgagcaacaagcgacccaaggaccacagaacagaaacaagagaagaaacgactcaaaatttccaagaagccaaaggacccagagccaccagaaaaagagtttacgccttacgactacagccagtcagacttcaaggcttttgctggaaacagcaaatccaaagtttcttctca

SEQ ID NO: 2312 - DNA, 565 bp, Homo sapiens
ccggaatgaggggattgatttgacgcacaatcctgagttcaccacctgtgagttctacatggcctatgcagactatcacgatctcatggaaatcacggagaagatggtttcagggatggtgaagcatattacaggcagttacaaggtcacctaccacccagatggcccagagggccaagcctacgatgttgacttcaccccacccttccggcgaatcaacatggtagaagagcttgagaaagccctggggatgaagctgccagaaacgaacctctttgaaactgaagaaactcgcaaaattcttgatgatatctgtgtggcaaaagctgttgaatgccctccacctcggaccacagccaggctccttgacaagcttgttggggagttcctggaagtgacttgcatcaatcctacattcatctgtgatcacccacagataatgagccctttggctaaatggcaccgctctaaaaagggtctgactgagcgctttgagctgtttgtcatgaagaaagagatatgcaatgcgtatactgagctgaatgatcccatgcggcagcggcag

SEQ ID NO: 2313 - DNA, 169 bp, Homo sapiens
gcagtcttgtgagatgggggcacatagcactggggaaagcagaactccattctcacctctattttgagcttcagtgctttatttcagtatgaggaaaaacaacaacaaactgaagtgcgctttccgtcctttcaaaggacgactgtcgggaagggagagccgagttgtg

SEQ ID NO: 2314 - DNA, 446 bp, Homo sapiens
  misc_feature 434: n = A,T,C or G
accaggcctgtggccctgcagaagagcccacgtgcaaatccagctcctcccagcagaacaacacagtcctggtggaaggctgcttctgtcctgagggcaccatgaactacgctcctggctttgatgtctgcgtgaagacctgcggctgtgtgggacctgacaatgtgcccagagagtttggggagcacttcgagttcgactgcaagaactgtgtctgcctggagggtggaagtggcatcatctgccaacccaagaggtgcagccagaagcccgttacccactgcgtggaagacggcacctacctcgccacggaggtcaaccctgccgacacctgctgcaacattaccgtctgcaagtgcaacaccagcctgtgcaaagagaagccctccgtgtgcccgctgggattcgaagtgaagagcaagatggtgcctggnaggtgctgtccc

SEQ ID NO: 2315 - DNA, 481 bp, Homo sapiens
  misc_feature 473: n = A,T,C or G
accaaccctgggtgaagctggtgagcaggcctaaccatagggacatgggggacagggggaacttggtggacagggcggagaaaaggtgttgtaggaactggggatgccaaggtgggtgtttttctcccagttgctttaggtcgataatcttgttctttggtgtaacggttggcctgggacagtggggtggaacacgaagacctctgtaatgctgacagtttggaatttgtagtgggagaagagtctcgatcggcactgggtacatcagacaattgcattgctaccaagtttcataccaaatatttgaaaggatggtattgaatctaaaaccaaatattagtttttattaaactcatgggaaggctaatatattccaacgtaaattattacatatggttaagtaattgcatgttaatttattttaatgtaaatatttttgttactgttctgagccaaattctaaagaaaaaatnaatacatt

SEQ ID NO: 2316 - DNA, 379 bp, Homo sapiens
acttgctgctgcaaactgcacgttaacacccatagcgctcaattcttatggatatgcagacagtgttttggggaccaccgtggagaatctgtttcaaactaaggcgtgagcttctaagaactaagtcactaagacatcagaactcacagtgaacaaaggcagaggaaggtgaccaaatcagctcataaactcatgactctaagtttccagtggaacaaagaacacattgaaaaacattttttgatccttcatgttggagagaaatggaatgtgaccagaattcatggttctatatttaccactgtctaaaagtcacaaaacaatatctaattttttcatggtttctaatgcagttacagttttgttcttaggtcacagt

SEQ ID NO: 2317 - DNA, 325 bp, Homo sapiens
ccgggcaggtctttaatgtataaaataaatattatacaatatacttgtatagcagtttctgcttcacatttgattttttcaaatttaatatttatattagagatctatatatgtataaatatgtattttgtcaaatttgttacttaaatatatagagaccagttttctctggaagtttgtttaaatgacagaagcgtatatgaattcaagaaaatttaagctgcaaaaatgtatttgctataaaatgagaagtctcactgatagaggttctttattgctcattttttaaaaaatggactcttgaaatctgttaaaataaaattgt

SEQ ID NO: 2318 - DNA, 384 bp, Homo sapiens
tgagtgaatactgatagtggactagaaaagcatagtcaagaaaagtgacccaccttgttacttgaccagcagtctagctgagagatctgattttatgttcgtaactttctgtaaagaaagacacaaggacttttcaaagacagtttatatctttccaaggcaggaagctttgcatttgcaatcttagtgttgtgtccctttctgattttcaaatacatcacacctgccttcctgttttgggagcaaagatgtaatttcaattccccttgctaccgtccttatttaaattatttccattctaagagatttttgttatttttttaaatgtaatctgagcacttttttgtattctaaaagatagatgatatcagataaatatgttgt

SEQ ID NO: 2319 - DNA, 372 bp, Homo sapiens
tggcggcgtcaaaggtgaagcaggacatgcctccgccggggggctatgggcccatcgactacaaacggaacttgccgcgtcgaggactgtcgggctacagcatgctggccatagggattggaaccccgatctacgggcactggagcataatgaagtggaaccgtgagcgcaggcgcctacaaatcgaggacttcgaggctcgcatcgcgctgttgccactgttacaggcagaaaccgaccggaggaccttgcagatgcttcgggagaacctggaggaggaggccatcatcatgaaggacgtgcccgactggaaggtgggggagtctgtgttccacacaacccgctgggtgccccccttgatcggggagctgt

SEQ ID NO: 2320 - DNA, 419 bp, Homo sapiens
accgctccaggccagctgtgtcccagatctgagccttgacagcagcggtgcccaacatcacagtgcgggtggagaactcaaccccgatggtggtgcggctgtcgtggctgaactcattgcgcgtgaatcgggagagtagattggtcttccccacacctgattcgtcgatcagcaccaccttgaagacaaagttataatcttcctcagttccattccccatcttggctccgcatggagggtgcaggtgtcttcggggacagaggcgacaaatctgtgtgttggctcaatgccctcaaccctcagctctcaaaagatctggtcctgcccctcctctcattgggggtaaggggacttctgcagccagagggattgggggccaactcaaggttaggcagggcctagggaggatcagctctggc

SEQ ID NO: 2321 - DNA, 522 bp, Homo sapiens
acaatcagtaagattttgatttttaacaagtttacatgtccaattacatgtagataaaaggaatgaaaaccagtaaagacaccttttataatctgaaaatagatttttaaaccttcctttaatgtgaaattttctctttaatgtgttatgaattctatcaaatataaccatttaggattatttatagtatgtcactgatcacttctactagtatagacaaataaatttataaacattattttgaatgtaactaattagcataattttatttaagagttagactgtgttgtcaatactgacatttttgggaatatatagtatagtttatgagtcaagcttctgaaccaaaagttttactttgagccctattcctaccttacaagctagcaggtgaccttgggcaagccaacctattagaaccctgggttcacgtccatacagtgaagacatcataacctgtcctacctacttcacaagcttcctctaccgatcaactagatcaatatatgtaagatttttttt

SEQ ID NO: 2322 - DNA, 473 bp, Homo sapiens
cagtaacggggcagagaggctgttcgcagagctgcggaagatgaatgccagaggacttggatctgagctaaaggacagtattccagttactgaactttcagcaagtggaccttttgaaagtcatgatcttcttcggaaaggtttttcttgtgtgaaaaatgaacttttgcctagtcatccccttgaattatcagaaaaaaatttccagctcaaccaagataaaatgaatttttccacactgagaaacattcagggtctatttgctccgctaaaattacagatggaattcaaggcagtgcagcaggttcagcgtcttccatttctttcaagctcaaatctttcactggatgttttgaggggtaatgatgagactattggatttgaggatattcttaatgatccatcacaaagcgaagtcatgggagagccacacttgatggtggaatataaacttggtttactgtaatagtgtg

SEQ ID NO: 2323 - DNA, 502 bp, Homo sapiens
  misc_feature 135, 140, 150, 152, 177, 339, 380, 391, 443, 453, 464, 473,486, 488: n = A,T,C or G
accaatgaaaatagctttttccccttcaaggggaagaaagaaaaccactcctcaaaacccagcagatctggctgtgaggtctttcctcctatctcatctcttcaggctttttttttttttttttttttttttttngcagnggagcaagananaccaaaacctaacctgagttacaanaaacaagacagtaatggctataaagggagtgaccaggagcaactgggacactcctttacctcccatatccaatgtatgtgtttcacagaaaaacaacaaaattaacaaattcacaaaatacaacagctagaattacaaaatccattcatccaagggtggtanaaggcaggatggaaaggtggaagggtaaatggcacaggganaaaaacaaagngttccaatcagtccaggcacagggactggcaaatgctaaaaaatagctgcanaaaaacctgnggtcctttcanactcacggngatgttaaaaatncncacactggtgtcag

SEQ ID NO: 2324 - DNA, 199 bp, Homo sapiens
actgtgtataatatttttatattattggccttaccataaaattatttagaaaggttgtcaaaataagttatacctctttggcaatagatagatgtatacatctacctactatgatctacaattttaggttaagtgaagcttgggggggctactgacttggttaccttcttgtctcttgtcccaaagatttaaactgtgc

SEQ ID NO: 2325 - DNA, 583 bp, Homo sapiens
  misc_feature 474, 535: n = A,T,C or G
actttatcagttacatttataattaataaccttccaatcactgagtttagaaattgcagtatttactgagctaacctttctcacaaagtaaggcacaactacatgatcacaagtagtaaacacaatacaaataatgaacccaagaactaaatgagaaaatgttcatgcataagtatctacagaacttatgaatatatgatccagttcaaggaattacagaatgtcatatacacaactgcattgtgttacaataaatttattacttctacacagaaagaacttagtgacttctaattctattttatacaattttacataaatttagtaagtttatgcacaatattcacatctgcaacaataacaaattgatcattaaaattcaggctaagggcaattaagacacaataatgtgtggcacgttataattacagaataccattcatcaagctcatgtctaggaatactataatggtngcacatttaaatcttatggatcaaatcatccatggttttatagccaaagtgcatttttttnaaaaaactcctatagtcaaacaggtcatgaatatcaaatatatgatca

SEQ ID NO: 2326 - DNA, 438 bp, Homo sapiens
actccatgtgatgtcagctgggctgcagtcatctgggggccagactaggctggggtgatcaggatagctcacacacgtctgggaccttgtggcaggtggctggaaccctggactcagttggcatgctgggacaacaggactgttctctcactctatggagactcagagactctccctctccatatggtgtctctagggtagccagacatcttacgtggcagtttagggctcccagaagcactaaagtggaagctgccaggccttctgaaggctttgtccccagattggcagagcatcacttctgccccatcttgttggttagagcatgttacaggccagccctggctcattgtgggaggaaactacacgaagccatgagtgtcaaaaggcatggcttgttggagctacttttggagaagagctaccacaggaaatggt

SEQ ID NO: 2327 - DNA, 472 bp, Homo sapiens
acaaagcagcaactgcaatactcaaggttaaaacattagaaaagcatttgtgtgacaggtatattacagtattatcaaaatattacattttcagacttacttagcagataatcatccaccagagcttaaatctttaaattatttccatagtcttaaaaaatatgtaatgtcagaatgcatataaaaagaatgtaaaaggaaacctaaaatacaaatggaataatgtaacaaataaatatttgatttcagtaactgttaataatcagctcaacaccaccattctctctaaactcaatttaattcttataggaataatgaactgtcaaatgccatggcataattatttatttccaagctatcatcaatgattagaactaaaaaaatttggcataaaaaaatcacaattcagcataaataaagctatttttagcttcaacactagctagcatctctaagaattgttgaaataagt

SEQ ID NO: 2328 - DNA, 456 bp, Homo sapiens
gctacacaacactgaaggggtgaaataaaagtccagcgatccagcgaaagaaaagagaagtgacagaaacaactttacctggactgaagataaaagcacagacaagagaacaatgccctggacatggctccagagatccacatgacaggcccaatgtgcctcattgagaacactaatggggaactggtggcgaatccagaagctctgaaaatcctgtctgccattacacagcctgtggtggtggtggcaattgtgggcctctaccgcacaggaaaatcctacctgatgaacaagctagctgggaagaataagggcttctctctgggctccacagtgaaatctcacaccaaaggaatctggatgtggtgtgtgcctcaccccaaaaagccagaacacaccttagtcctgcttgacactgagggcctgggagatgtaaagaagggtgacaaccagaat

SEQ ID NO: 2329 - DNA, 203 bp, Homo sapiens
acacaatggtttattaaaggaatgtatggcccacatcaacctagcaaggattctactggtaaaccttcctatggccaaaggaaaaacaagcaggagttgagtggctggggtggggtgcaggcaatggagagagggcagaagggtgtagaagctgaaggggtctagaagcttactcctgagtttcttccttctgtcttcaaatc

SEQ ID NO: 2330 - DNA, 393 bp, Homo sapiens
acagctaccacgacatcaatgtctattcccttgcgggcttggcaccacacattactctaaatccaacaattcccttgtttcaggcccatccacagttgaagcagtgtgtgcgtcaggcaattgaacgggctgtccaggagctggtccatcctgtggtggatcgatcaattaagattgccatgactacttgtgagcaaatagtcaggaaggattttgccctggattcggaggaatctcgaatgcgaatagcagctcatcacatgatgcgtaacttgacagctggaatggctatgattacatgcaggggacctttgctcatgagcatatctaccaacttaaaaaacagttttgcctcagcccttcgtgtaagttggctatttccttggtataggt

SEQ ID NO: 2331 - DNA, 418 bp, Homo sapiens
acactctggagacattaaccctgtccatgcccactgttgaggctggaggcaccgtcctgggcacccaccacttccaagttgccttccttcatctggtctgcgtggtggagtgaaggtcagtgggacggacttgcagctggaaggctgggggaatgttgaaaaggccactgacggtgggcttgaggctcagggtgtccggcgggcacgggctctccagggaaaaggcttgtaggatggtggtgaagaagaggaagagctccgcttttgccaggccctctccaaggcagacacgcttccctaaggagaagggcaggaacgcctcatgcttcctgaaccgtccatctgcatccaggaaacggtctgggttgaactcttctgggtgcttgaagatgttggggtcatgcaggatggagccaag

SEQ ID NO: 2332 - DNA, 318 bp, Homo sapiens
actgaacaggtaagtcatccctcagccagagattagtctacttcttccatgcgtgatgtgtcgtcatctccttcaaggggtggcatttcttcagttacagcagcactggtatcatcagcagtagggtcatcttcatcaatacccagaccaagtttgatcatcctgtagatcctgttagcatgtgtctggggatcttccagactgaagccagaagacaggagcacagtttcataaagcaagatgaccagatccttcacagacttgtcgttcttatcagcctctgccttttgccttaaggtctcaataatggaatggtca

SEQ ID NO: 2333 - DNA, 329 bp, Homo sapiens
acgtcctccaaaagacagctgaaagtggagagattttgatttggtgctgttagaggtggcaattaagagcataagcaccagggagatggtttaatggtaactgccttttttgatgtcaggctggagctccaactgggaacttgcgttacatgcaagattgattggatagggaacactccctgacaaagagctacataattagaaatggatcaagttacagggaggataaggggaaggcttcacattcataatagagctcaagacattacaaattcatgctgacagggctgtggcattgccagacagaggctataagtggaactacaagt

SEQ ID NO: 2334 - DNA, 525 bp, Homo sapiens
tgcaaagcctgaacgaccgcctggcctcttacctggacagagtgaggagcctggagaccgagaaccggaggctggagagcaaaatccgggagcacttggagaagaagggaccccaggtcagagactggagccattacttcaagatcatcgaggacctgagggctcagatcttcgcaaatactgtggacaatgcccgcatcgttctgcagattgacaatgcccgtcttgctgctgatgactttagagtcaagtatgagacagagctggccatgcgccagtctgtggagaacgacatccatgggctccgcaaggtcattgatgacaccaatatcacacgactgcagctggagacagagatcgaggctctcaaggaggagctgctcttcatgaagaagaaccacgaagaggaagtaaaaggcctacaagcccagattgccagctctgggttgaccgtggaggtagatgcccccaaatctcaggacctcgccaagatcatggcagacatccgggcccaatatgacgagc

SEQ ID NO: 2335 - DNA, 146 bp, Homo sapiens
acctttccagattcgaagaagcaatgaagctaaggaaacagctgattagtgaaaaacccagtcaagaggatggaaatacaacagaagaatttgactcttttcgaatatttagattggtttgatgtgctcttcttgctcttggagtc

SEQ ID NO: 2336 - DNA, 396 bp, Homo sapiens
  misc_feature 137, 343, 381, 390: n = A,T,C or G
acagaaaccaattatctttgactgccgttctcgaccacgtaatgtgccagtcatcactggtagcaaagatttacagaatgccaacatcacactgcgcatcctcttccggcctgtcgccagccagcttcctcgcatcntcaccagcatcggagaggactatgatgagcgtgtgctgccgtccatcacaactgagatcctcaagtcagtggtggctcgctttgatgctggagaactaatcacccagagagagctggtctccaggcaggtgagcgacgaccttacagagcgagccgccacctttgggctcatcctggatgacgtgtccttgacacatctgaccttngggaaggagttcacagaagcggtggaagccaaacaggnggctcagcnggaagc

SEQ ID NO: 2337 - DNA, 422 bp, Homo sapiens
actcctgtgccacaggggttccagaaaagggaagtcactttaccttgcggtggtgggatcctgatgtctttcatccatttgtagtaaaagctggtaaagcttttcttactcctggttccctaccagtatttctaaacatgtcgcactttctccacaggcatgtggttttgacctttttttcaatcttctagaaagggaacggaagcagaagtgggacatcgagggctctgctgtcctctgcgctgggtgtggaatgctgctgcacctgtcccttctgctggctcagggaagtgtcttcttgcccacatttctgtggggaaaggtttttaatcctctgatgcttccatcttcctgtttaggccatgtgcccagaaacctggactgatctttctttaatagtgaacccctgggccactgaagag

SEQ ID NO: 2338 - DNA, 490 bp, Homo sapiens
ttccacccctgccaggcccagcagccaccacagcgcctgcttcctcggccctgaaatcatgcccctaggtctcctgtggctgggcctagccctgttgggggctctgcatgcccaggcccaggactccacctcagacctgatcccagccccacctctgagcaaggtccctctgcagcagaacttccaggacaaccaattccaggggaagtggtatgtggtaggcctggcagggaatgcaattctcagagaagacaaagacccgcaaaagatgtatgccaccatctatgagctgaaagaagacaagagctacaatgtcacctccgtcctgtttaggaaaaagaagtgtgactactggatcaggacttttgttccaggttgccagcccggcgagttcacgctgggcaacattaagagttaccctggattaacgagttacctcgtccgagtggtgagcaccaactacaaccagcatgctatggtgttcttcaag

SEQ ID NO: 2339 - DNA, 487 bp, Homo sapiens
  misc_feature 421, 451, 466: n = A,T,C or G
acaggctgacagagaagattcccgagagtaaatcatctttccaatccagaggaacaagcatgtctctctgccaagatccatctaaactggagtgatgttagcagacccagcttagagttcttctttctttcttaagccctttgctctggaggaagttctccagcttcagctcaactcacagcttctccaagcatcaccctgggagtttcctgagggttttctcataaatgagggctgcacattgcctgttctgcttcgaagtattcaataccgctcagtattttaaatgaagtgattctaagatttggtttgggatcaataggaaagcatatgcagccaaccaagatgtaaatgttttgaaatgatatgaccaaaattttaagtaggaaagtcacccaaacacttctgctttcacttaagngtctggcccgcaatactgtaggaacaagcntgatcttgttactgngatattttaaatatccacagt

SEQ ID NO: 2340 - DNA, 447 bp, Homo sapiens
  misc_feature 288, 324, 363, 435, 442: n = A,T,C or G
acaagctttttttttttttttttttttttttgctttcttgacccagctaaatttttatttttatttttttatagagatgaagtctcgctatgttatccaggctggtctcaaacacctggcctcaagccatcctcctgcctcagcacatgggatgaaacaatataaattcaaaacttacagataagggttagctctatcactcaactctttaaaaagtttatatgaatatccagtcaaaaccaacacggtattgcccttgaaatgttaactagacggatttccaagganaccacaggactgtatactgtcttggaatgtcctcanaaggctctgtcattgatcaggtaacagtaaaaaccccanagtcctttctttcaaatggaaaagggaaagcagagggacagaagctattcaaacttcgtcttctttccttgnggcttgnggtca

SEQ ID NO: 2341 - DNA, 74 bp, Homo sapiens
  misc_feature 54, 66: n = A,T,C or G
acaagctttttttttttttttttttttttttttttttttttttttttttttttncgaattaaattnaaatgttt

SEQ ID NO: 2342 - DNA, 513 bp, Homo sapiens
  misc_feature 59, 260, 471, 497: n = A,T,C or G
aaaaagaaaaaaaaaaaaaaaaaaaaaaaaaaaagcttgtacacgagccaattaaccanagtgcaattacattaaaaacctcccccaaactttccgtggcacattgcattatggtaaaaccagaggttcatcacctattttgtattagttaggccagcctgtgatagtaaaaacaaaaaatttaatttaaaaaataaagcaggagctatttagacaacaaaattcaaagtaaactaattctgtaactgctgactttgaanacatcccacagtgactgtctgccccacaacacatatccgtggaccccagtactattgacccagcgatgggggcttcgacatgggctttagggagtcataagtggagtccgtaaagaggtatctttactataaaagctattgtgtaagctagtcatattaagttgttagctcaggagtttgatagttcttgggcagtgagagtgagtagtanaatgtttagtgagcctagggtgttgngagtgtaaattagtgc

SEQ ID NO: 2343 - DNA, 211 bp, Homo sapiens
actagtgtccgtgcaaagaagtcctccaggtggctgaggacactctccagttctgccagggcttgttggcatttcctgctgctcacctcagtggtggcccgaggtttcttcttcagcatctcctctgcctgtgaggacaaagaatggtgggagagaagaacaaggcagggggaagctaatgctctttgaaaagaaccctgctgggatgtgt

SEQ ID NO: 2344 - DNA, 394 bp, Homo sapiens
ccccgcgcttcccaggaggttcatctgctccttccctgactgcagcgccaattacagcaaagcctggaagcttgacgcgcacctgtgcaagcacacgggggagagaccatttgtttgtgactatgaagggtgtggcaaggccttcatcagggactaccatctgagccgccacattctgactcacacaggagaaaagccgtttgtttgtgcagccaatggctgtgatcaaaaattcaacacaaaatcaaacttgaagaaacattttgaacgcaaacatgaaaatcaacaaaaacaatatatatgcagttttgaagactgtaagaagacctttaagaaacatcagcagctgaaaatccatcagtgccagcataccaatgaacctctattcaagtgt

SEQ ID NO: 2345 - DNA, 466 bp, Homo sapiens
acttagaaagttatctgttgtgtagaataatgatgtagagtttactaatcagtgaggatgtcttgtttttattttctgcaaactctgcctcactttaaaatgcattataacaatacctaattaaagataattttggctctgaaagttaccttattttttgttgagttagtgacttcatttttcttgccacaatataagcttttgagggatttttttaaattggtgcttttaataagcaaataaatcccagggttttattttcttcagtgatacccctatagaaactcttaaatgtatttgcgcatatatatatatatattttcttatgcatgctcgatgcattttcgtcctgagaaaaatgttctctacagaaactacccgtgtgtaaaaagaagattggcttaaaatggctactgtgatgggaacagtgtcttagggagatgcagcttggacttgaggtaaattg

SEQ ID NO: 2346 - DNA, 268 bp, Homo sapiens
acaaatatgaagcacagtgtttagtttaatttccctttaggttttcctcacattggtgcataagtggctgactacatgacacaacatgccccattctacttgttgcatacaaagtagaagaggaatgtgaggacaaatttaaagtagaaaatgaaaataaatggcaaaaatacagtgcaaatgctttaaacagtgcactttataaaatagtttgctttattcatacttttttataaagtgcaatattacttaaaacagagagacatgt

SEQ ID NO: 2347 - DNA, 404 bp, Homo sapiens
actgccccctggcatgctagatgaacccattcgagcctggtccttcacaacagtgtagaaataggggtgctccattgcctctcttgcagtaagccgtgactggtggtcatatcgcagcagtttgtccaggaaatccaaggcctcagggctgacaaggtgctgattttcactgtggacaaagcgttcccatcgctttcgagagtgtctgcccaagatatcattgaaacgtggatctaattcaatgttgtatttgtcaatatagtcatataaatcttctgtccccagaaccttggctatcctcaccaactgatcataattgtcatgtccatggaaaaatggctccttccgaaagatcatacttgccagcatacaacccaaactccacatatccaaactataatcgt

SEQ ID NO: 2348 - DNA, 403 bp, Homo sapiens
ggcgtgatgtctcacagaaagttctccgctcccagacatgggtccctcggcttcctgcctcggaagcgcagcagcaggcatcgtgggaaggtgaagagcttccctaaggatgacccgtccaagccggtccacctcacagccttcctgggatacaaggctggcatgactcacatcgtgcgggaagtcgacaggccgggatccaaggtgaacaagaaggaggtggtggaggctgtgaccattgtagagacaccacccatggtggttgtgggcattgtgggctacgtggaaacccctcgaggcctccggaccttcaagactgtctttgctgagcacatcagtgatgaatgcaagaggcgtttctataagaattggcataaatctaagaagaaggcctttaccaagt

SEQ ID NO: 2349 - DNA, 544 bp, Homo sapiens
  misc_feature 514: n = A,T,C or G
ccaaaatgacaggaggtttacagacatatgcttcagatcaagttcagaacaatggcctcattgatgcttttggggccctttcatcaggaaatggagctgtctctcagcgctccatccagcttgagagtaagggattaaccctccagaacagccagtggatgaatggcacagtgatcgtggacaacaccgtgggaaaggacactttgtttcttatcacctggacaacgcagcctccccaaatccttctctgggatcccagtggacagaagcaaggtggctttgtagtggacaaaaacaccaaaatggcctacctccaaatcccaggcattgctaaggttggcacttggaaatacagtctgcaagcaggctcacaaaccttgaccctgactgtcacgtcccgtgcgtccaatgctaccctgcctccaattacagtgacttccaaaacgaacaaggacaccagcaaattccccagccctctggtagtttatgcaaatattcgccaaggagcctcccnattctcagggccagtgtcacagccctgatt

SEQ ID NO: 2350 - DNA, 275 bp, Homo sapiens
acagagtcttttgcttcctcccacccctagggggaaaaactgctttgtgctttgggaagttgtctctgaaacccggggacagaggacgcaggacagactaggagggagccgggaggatgggctgcagctgtggaggagggtttcagaggagagaggtcggagagcagaggcctgagaagccagaggcaggtggagagagggtggaaagtgagcagcgggctgggctggagccgcacacgctctcctcccatgttaaatagcacctttagaaaaat

SEQ ID NO: 2351 - DNA, 521 bp, Homo sapiens
actgactgagataagaaaagcctgaactatttattaaaaacatgaccactcttggctattgaagatgctgcctgtatttgagagactgccatacataatatatgacttcctagggatctgaaatccataaactaagagaaactgtgtatagcttacctgaacaggaatccttactgatatttatagaacagttgatttcccccatccccagtttatggatatgctgctttaaacttggaagggggagacaggaagttttaattgttctgactaaacttaggagttgagctaggagtgcgttcatggtttcttcactaacagaggaattatgctttgcactacgtccctccaagtgaagacagactgttttagacagactttttaaaatggtgccctaccattgacacatgcagaaattggtgcgttttgttttttttttcctatgctgctctgttttgtcttaaaggtcttgagggttgaccatgttgcgtcatcatcaacattttgggggttgtgttgga

SEQ ID NO: 2352 - DNA, 212 bp, Homo sapiens
acatcttgatttttaaaatcccatgttctcacttgttttttttaaaatcccacttattctgagggtctagcagctagagaagtgctttctattttgttagaccctgagcttgacacttcacatgtacaagcttttttttttttttttttttttttttttttttttttttttttttttttttttttttttttttttttttttttttttttttt

SEQ ID NO: 2353 - DNA, 347 bp, Homo sapiens
accttattatcctacatcgcaaatttcaacagctacattatatttccttctgacacttggaaggtattgaaatttctagaaatgtatccttctcacaaagtagagaccaagagaaaaactcattgattgggtttctacttctttcaaggactcaggaaatttcactttgaactgaggccaagtgagctgttaagataacccacacttaaactaaaggctaagaatataggcttgatgggaaattgaaggtaggctgagtattgggaatccaaattgaattttgattctccttggcagtgaactactttgaagaagtggtcaatgggttgttgctgtcatgagcatgt

SEQ ID NO: 2354 - DNA, 385 bp, Homo sapiens
acgatgatgaagatatcagcgaagatatcaaatttcttttggaaaaacttggagagagtgtccaggaccttagttcatttgatgaatacagttcagaacttaaatctggaaggttggaatggagtcctgtgcacaaatctgagaaattttggagagagaatgctgtgaggttaaatgagaagaattatgaactcttgaaaatcttgacaaaacttttggaagtgtcagatgatccccaagtcttagctgttgctgctcacgatgttggagaatatgtgcggcattatccacgaggcaaacgggtcatcgagcagctcggtgggaagcagctggtcatgaaccacatgcatcatgaagaccagcaggtccgctataatgctctgct

SEQ ID NO: 2355 - DNA, 310 bp, Homo sapiens
  misc_feature 30, 98, 103, 121, 125, 136, 150, 155, 194, 197, 213, 218,236, 239, 250, 301: n = A,T,C or G
acaagctttttttttttttttttttttttngcgtgaacagagttcttattgacaagctttttttttttttttttttttttttttttaaaaccattacngggantttattataatagttaanaatnttttaggggtntacaatcatatcanaattnctcaagctatatacaaacaggtatttatataagtctacnttnaaaaaagaaaaagcanttaangacctccccaaaatcacnttntcatcaacaanatttttttttaaaagttacggccaatccaataacaaaaaaattcacagttnttctgcaaa

SEQ ID NO: 2356 - DNA, 272 bp, Homo sapiens
acacaactgcaactctacataaatgccacagatgcagaatactgttttcttgctctatttacacagctgatatacctattctaacgaaggagggagaggagtaatgcacaagaaactcaggccaatgggggagcaagaagaaaacgaagaagtgcagtgcatgcgtcatcggtgtttaacagtcagaagcgaaacagttcagaacaaggcctgccctgtcaaaagaagagctaaagacagttagttatataaaaattaaggtgggctttcag

SEQ ID NO: 2357 - DNA, 427 bp, Homo sapiens
  misc_feature 76, 169, 237, 262, 281, 342, 386, 401: n = A,T,C or G
acctgcagcttctgcagagggccaccctggaccctgagacggggctcctatttctttctctctctctacagtgacntgggcttcctccgtgcagttttctgcaactctggagaagtggaggcatacttgtgtgtctgggttgttttttttttttttttttttttttggncattctttaattttgttgttttacccattcgttatctgtggaaaacgttttaagttgtcatgtgacanaaacttttcctttgtccatcgaggngtttcataagttttttggngtgttttctgggtcgtctatgtgtcatatggttttacttttctctcctttttcgttttcanaacatttttctgtctgttttggattcactgcttccattttacanaatgtcactctttanactctcagtccatcatgccatcgggt

SEQ ID NO: 2358 - DNA, 255 bp, Homo sapiens
acgcctgggagcccagcttcctgaagcaggtggagggcatcaggcagggtgagctccagctgctgcgcacggcggcctacctccacaccacaaccaccttcacctggatgtgcagccccttcctggtgaggcttggcacagggctgggtccctgcctccagggctctgggtgcccaggcatggccagggctcattggactctaccctgacaccacctccacgctgctcaggtgaccctgatcaccctctgggtgt

SEQ ID NO: 2359 - DNA, 459 bp, Homo sapiens
  misc_feature 407, 438, 441, 444: n = A,T,C or G
acgatgtctagtgatgagtttgctaatacaatgccagtcaggccacctacggtgaaaagaaagatgaatcctagggctcagagcactgcagcagatcatttcatattgcttccgtggagtgtggcgagtcagctaaatactttgacgccggtggggatagcgatgattatggtagcggaggtgaaatatgctcgtgtgtctacgtctattcctactgtaaatatgtggtgtgctcacacgataaaccctaggaagccaattgatatcatagctcagaccatacctatgtatccaaatggttctttttttccggagtagtaagttacaatatgggagattattccgaagcctggtaggataagaatataaacttcagggtgaccgaaaaatcagaataggtgttggtntagaatggggtctcctcctccggcggggtcnaanaangtggtgttgaggttg

SEQ ID NO: 2360 - DNA, 376 bp, Homo sapiens
actgcatgcgtcgaatgaccttaatggtggcccgatggtgttcccgcagctgtgagatgtgggtgatgggtgtcagcagagtctccccttccaggtccaggtcctcggcgaagctgttggttctcatgaaatggggcatgctcacttccagcagtgttgggctcttccttacagaactgtcatagccgtcgacagagaagtggtccagccgccgctcttctggggggtcgcacgtgatatgggggactgtgagcatcttctctccaggagtcaccccattgtctttgtccagcttgaacttttttttctttaccaccacagacttcttgggtttggggctgggtgacagcagagtgtggctccggggggccttccg

SEQ ID NO: 2361 - DNA, 439 bp, Homo sapiens
acgaagttctcagtttcactttagtagaaagagctctagaaatgaggctgataaacacatctaagaacactggttgctttctaaaatttccaaagctccaccataaatgtaatttttagtgtttcaaatgattgcattttaaagtatataaatatgggttatccaatatcaatgctatagtaacatcctgaaacaaaacaagcacaaaggtataaatgcctaaactggaggaaacttgaaaccctcatgttaaatcttaaatgtagtatttctaacttgtgaagacagattggtaggcagccatttttttgtgtcttaaaataactgggggcatagttaaaattttatacatcaagtgattgctattattgaatgttgcaggtgagatgtggttatttttagtttatttgaaatgtttgactggaaaggggggaggggg

SEQ ID NO: 2362 - DNA, 421 bp, Homo sapiens
acgaaaacagaaccaatctaaaaatggctgatgttactttaggagcctgaaaaaaacaggagatccttgaagacccagccaccccttctagaatgttcaataagggcacctttccaaagctactaagcaggcacttggcatttcaggagtttgtcttatggttgcataaaagtatccctttcacccagacctggcaccctttatggttcaaagttaagaacgggaagaatgggtggcaaggtggctcctggaagagctcacccagcacagctgccctgagctcggggccttggtttctgtccctggggatatttatatttaataaatttttatataaatacacagagaaatagaaaatataaaatctgaggggttggggaagaaacgtgagggactcagcaggaagccagagctggagagg

SEQ ID NO: 2363 - DNA, 339 bp, Homo sapiens
  misc_feature 59, 97, 123, 132, 193, 220, 245, 251, 255, 271, 306, 338: n = A,T,C or G
ctttttttttttttttttttttttttttcttttttttttttttttatgactaagccaanaacttccagtttttattttttaaacatcatttaacaanaaaaaacattcaaccaaattaaaaanaactaggtnggattaatttacaataaaataatcaacttaaaatatcggcccttccatttagggccaaggnggccaatagttcctgtttaaacagcanaattgcacaattatttttacctatntttganggcncaaaaaaataaaagtnttacaacttccacggacatcctcccctccctccanagcaaagttcatacaattccatcttaggtcant

SEQ ID NO: 2364 - DNA, 407 bp, Homo sapiens
acagtccagtccttggagatcgacctggactccatgagaaatctgaaggccagcttggagaacagcctgagggaggtggaggcccgctacgccctacagatggagcagctcaacgggatcctgctgcaccttgagtcagagctggcacagacccgggcagagggacagcgccaggcccaggagtatgaggccctgctgaacatcaaggtcaagctggaggctgagatcgccacctaccgccgcctgctggaagatggcgaggactttaatcttggtgatgccttggacagcagcaactccatgcaaaccatccaaaagaccaccacccgccggatagtggatggcaaagtggtgtctgagaccaatgacaccaaagttctgaggcattaagccagcagaagcagggt

SEQ ID NO: 2365 - DNA, 447 bp, Homo sapiens
  misc_feature 71, 283, 408, 446: n = A,T,C or G
acctttaactcaatttaatataacaagaaatcgtaaaatacttataacctatcttagagaaatgagtgctngttttgagagttgttttttaactgaaagattatttctagatgggtagtgctttgtgctggtttctgcttccatatatttcccagtcattttaattagagaagatactctatggtagaactaaggcctttcctttcttggccaaagtctttaccctatttaaccctttgtatatttctgactgctcactgttcatattataggggaccagatntgtaatatagaattctccataacatgaatgaaattaattctgtccaagccagcatggtggcttcatattaagtagtaacagaagtctgaacaattggataaatttgacttccaagacagctaaanttttcaactgcaattttaaaaactacactacactgttnt

SEQ ID NO: 2366 - DNA, 479 bp, Homo sapiens
  misc_feature 28, 105, 357: n = A,T,C or G
atttcgtgcaagtaatatttttaccagntaaaagtcattatgaaacacacattcttttaactgaatttcatatgttatataaaacttgaaaagtgtggcacattnctactattaaccattacattgttttttgttttttaaaaaaagtatatattaatcaaaagtatacattacccagaccttttgatttaaaatataactgaaggaaaatataaactctgagtaaacaggcattcttctacacaaacatgagttatttcagtaaaaaaacaacaacaaaaaagcaatttcaatgtaattaagccacctctgattaatacatattttcatgcatgtggaaaaattatttttaactanaactttaagaataagttccatagcaaacaagttacagcatttattcaataaggaatattaaaataattcattagtaaaaaataaaataacttcaaccatatacgtattataatttatcatgt

SEQ ID NO: 2367 - DNA, 494 bp, Homo sapiens
  misc_feature 454, 490: n = A,T,C or G
acattttaattttagactacttgaaaaggcccctaataaggctagaggtctaagtcccccacccctttccccactcccctctagtggtgaactttagaggaaaaggaagtaattgcacaaggagtttgattcttaccttttctcagttacagaggacattaactggatcattgcttccccagggcaggagagcgcagagctagggaaagtgaaaggtaatgaagatggagcagaatgagcagatgcagatcaccagcaaagtgcactgatgtgtgagctcttaagaccactcagcatgacgactgagtagacttgtttacatctgatcaaagcactgggcttgtccaggctcataataaatgctccattgaatctactattcttgttttccactgctgtggaaacctccttgctactatagcgtcttatgtatggtttaaaggaaatttatcangtgagagagatgagcaacgttgtcttttctctcaangctg

SEQ ID NO: 2368 - DNA, 422 bp, Homo sapiens
  misc_feature 354, 405, 412: n = A,T,C or G
actggatgtcaggtctgcgaaacttcttagattttgacctcagtccataaaccacactatcacctcggccatcatatgtgtctactgtggggacaactggagtgaaaacttcggttgctggcaggtccgtgggaaaatcagtgaccagttcatcagattcatcagaatggtgagactcatcagactggtgagaatcatcagtgtcatctacatcatcagagtcgttcgagtcaatggagtcctggctgtccacatggtcgtcatcatcttcatcatccatatcatccatgtggtcatggctttcgttggacttacttggaagggtctcttgtttaaagtcattggtttcttcanaggacacagcattctgtggggctaggagattctgcttctgagatgggtcanggtttanccatgtggcc

SEQ ID NO: 2369 - DNA, 60 bp, Homo sapiens
  misc_feature 20: n = A,T,C or G
agggagctgaaagcaacgtntgatcaaagacaagggcagggcgagaacagctcccaccag

SEQ ID NO: 2370 - DNA, 332 bp, Homo sapiens
ggacacttcagtatttccaggaatagcatatgcacgctgttcttgcttcatggaatgctacatgctttctgtttttctcattttggatttctccaaaactaactgaatttaagcttcaggtccctttgtatgcagtagaaaggaattattaaaaacaccaccaaagaaaataaatatatcctacttgaaatttactctatggacttacccactgctagaataaatgtatcaaatcttatttgtaaattctcaattttgatatatatatgtatatatgcatatacatatccacacttgtctgcaagaatattgattaaaattgctaaatttgt

SEQ ID NO: 2371 - DNA, 405 bp, Homo sapiens
acagaaaacccaaaggcaaccgcatagcatatgtaaaatgtgcaaatacactttaaaatgcaagttattctatagcatttgcaagatagaatttcactgtaattagggaatctagttcatcctaacttaatagtcttttgcatgtatagacaatgcaattctacaaggcacaactcagcgttgatgctaaagtatgaaacacatccccagattatttatttgaaaatattaaaatagcatcgtttattattttttaatgagtcatgagctcatttctaaagcttcataaagcattacactgataacatatgtgtggtcaggacaaactgttccctgaacttaaaaggtgaaggacaagaccccatattattatcctgtattaaaaaaggaaatatacatatatgt

SEQ ID NO: 2372 - DNA, 286 bp, Homo sapiens
  misc_feature 35, 80, 104, 113, 139, 159, 173, 193, 210, 244, 251, 286: n = A,T,C or G
ctttttttttttttttttttttttttttttttttnaaaagtctatatttttatattggggggagggagtaaaaaagcaancccctatactgggccctattcagnggcagcttnttgttccataggattaaggaaaactntgaggaaataaaagttgttnggaaaaatccaggngtagttgctttgtatgttgngatgggtaaaagggatnaagtgaagtgtgaaggcccctcataccctccatnttgcctnaaactatgtcctggaaccctggggcggaaaaagcn

SEQ ID NO: 2373 - DNA, 251 bp, Homo sapiens
ctcagactgcagcgagcgctgttcctgttcctcaagctctggcctgacatgccaggcagctggctgcccaccaggccgtgtatgtgaggtcaaggctgaagcccggaactgctgggccacccgtggtctctgtgtcctgtctgtgggtgccaacctcaccacctttgatggggcccgtggtgccaccacctctcctggtgtctatgagctctcttcccgctgcccaggactacagaataccatcccctggt

SEQ ID NO: 2374 - DNA, 314 bp, Homo sapiens
acggatgctacttgtccaatgatggtaaaagggtagcttactggttgtcctccgattcaggttagaatgaggaggtctgcggctaggggtcaataaagtgattggcttagtgggcgaaatattatgctttgttgtttggatatatggaggatggggattattgctaggatgaggatggatagtaatagggcaaggacgcctcctagtttgttagggacggatcggagaattgtgtaggcgaataggaaatatcattcgggcttgatgtggggaggggtgtttaaggggttggctagggtataattgtctgggtc

SEQ ID NO: 2375 - DNA, 404 bp, Homo sapiens
acgattatagtttggatatgtggagtttgggttgtatgctggcaagtatgatctttcggaaggagccatttttccatggacatgacaattatgatcagttggtgaggatagccaaggttctggggacagaagatttatatgactatattgacaaatacaacattgaattagatccacgtttcaatgatatcttgggcagacactctcgaaagcgatgggaacgctttgtccacagtgaaaatcaacaccttgtcagccctgaggccttggatttcctggacaaactgctgcgatatgaccaccagtcacggcttactgcaagagaggcaatggagcacccctatttctacactgttgtgaaggaccaggctcgaatgggttcatctagcatgccaaggggcagt

SEQ ID NO: 2376 - DNA, 93 bp, Homo sapiens
acaaatggaggccttcagacctactgagtggggggctccgagggttggggcggtcctcaggatggaaggatggtgggtctcggtatagggaga

SEQ ID NO: 2377 - DNA, 539 bp, Homo sapiens
tgcttttgtaatgaaaatggagagaatgaagagcgctgtgccagtaaatactccccttcacctttctaattattaacttgttttcatggagtgactattcagcattggcagttaccacattctgttcaatttaaccaaactggctttttttttctagtgaagttaaacaaacattgggataccgacacagacaacttgagacagtttttttaatcttttaatcagtgtagctatgtgctgctgctgctcaagagctggatccatacaggttgtgtgccatctgtcctcttgaggttcaggagattctaaattgaatattccacggtttgggacagcatccggaagttttccctatgactttatattttgtattatgtcaaatgttatggcagggcccaaatagcatagccacaagtttggtttatgtgggcataaaattctaaccaaaccccagacatagggagtcatttggagaaagcctgtatgtggtgttttaacctaataaagttgatgagagagaaggggagaggaagcgaaca

SEQ ID NO: 2378 - DNA, 502 bp, Homo sapiens
  misc_feature 385, 420: n = A,T,C or G
tactcctaccactcaggtatcattactttagagtccattcttctcatttactgtatgctaaaaaatagaattaggctttttgtgactttttatccccagttactatattgtgatatgtttccacgtcgcaaacatctaagctttatgattttaagcttcctgccagcacttatagaaagggcacttcaaaattaaactcccaatgcacattatcattagttattaaggcaatgcaaatcaaaaccacaatgagctatcacttcacagccactaggatggctaaaactaaaaaaaaaaaagtcaataacagtgctgccaaagacatggagaaattggaactctcatcccttgttggtaggaatgtaaaatgatgttgttgctttanaaaacagtttgacagttcctcaaaacattaatttngaattaccaggtaacccagcaatttctgcgcctaggtatacacccaagcaagctgaaaacatatgtccacacaaaaatttgt

SEQ ID NO: 2379 - DNA, 463 bp, Homo sapiens
accagattcagcccatttggccccgacgcctctgttctcggaatccgggtgctgcggattgaggtcccggttcctaacggactgcaagatggaggaaggcgggaacctaggaggcctgattaagatggtccatctactggtcttgtcaggtgcctggggcatgcaaatgtgggtgaccttcgtctcaggcttcctgcttttccgaagccttccccgacataccttcggactagtgcagagcaaactcttccccttctacttccacatctccatgggctgtgccttcatcaacctctgcatcttggcttcacagcatgcttgggctcagctcacattctgggaggccagccagcttacctgctgttcctgagccttacgctggccactgtcaacgcccgctggctggaaccccgcaccacagctgccatgtgggccctgcaaaccgtggagaaggagcgaggcc

SEQ ID NO: 2380 - DNA, 101 bp, Homo sapiens
actctccactcttccagtcagagtggcacatcttgaggtcacggcaggtgcgggcggggttcttgcggctgccctctgggctccggatgttctcgatctgc

SEQ ID NO: 2381 - DNA, 419 bp, Homo sapiens
actcttgccctggccctgttggcaatggggtgggcttgggtcagcctcacccatcagaccacaagctccaccagggcaggcagcccatgcagtgcccctgcccagagcacagcacctggcacagaagagcagacaataaataccggctgtgagaaacaaatgggataatccaagccgaatgcttggcatggtgcaaatgtccaataaatatcagctgtcattgtctgttgaataaatgaacaggtgggttggtggggctgggggccaagagccacaagctgaggtggcttgtgtctgaggagggaagggacccgctgttccctggggttcacgcttcctttcttgaggttgtgtcctccttccccacaccctgcaggcctgcccagctcttcgtggcaaagcgggccccagatgggtgt

SEQ ID NO: 2382 - DNA, 443 bp, Homo sapiens
acaattgctctattgagtcaccacgaaaaggctggagcttcatgcatcctgggagactcacacatttgcatgaaggacttcctgttaaaaatggaacaagatacattgcagtgtcatttatagatccctaagttatttacttttcattgaattgaaatttattttgggtgaatgactggcatgaacacgtctttgaagttgtggctgagaagatgagaggaatatttaaataacatcaacagaacaacttcactttgggccaaacatttgaaaaactttttataaaaattgtttgatatttcttaatgtctgctctgagccttaaaacacagattgaagaagaaaagaaagaaaaaacttaaatatttatttctatgctttgttgcctctgagaataatgacaatttatgaatttgtgtttcaaattgataaaatatttaggt

SEQ ID NO: 2383 - DNA, 141 bp, Homo sapiens
acaattacccaccactggatttgactcagagaggacccccagagggtgtctccatcttccctatttattttcagcccttgagggcttcattgtagatcaaagccaaggcccccaggaaggtgacatactcctggaagttca

SEQ ID NO: 2384 - DNA, 378 bp, Homo sapiens
gaagaaggcaggggcccttagagtcttggttgccaaacaggtttgcagatcaaggagaacccaggagtttcaaagaagcgctagtaaggtctctgagatccttgcactagctacatcctcagggtaggaggaagatggcttccagaagcatgcggctgctcctattgctgagctgcctggccaaaacaggagtcctgggtgatatcatcatgagacccagctgtgctcctggatggttttaccacaagtccaattgctatggttactccaggaagctgaggaactggtctgatgccgagctcgagtgtcagtcttacggaaacggagcccacctggcatctatcctgagtttaaaggaagccagcaccatagcagagt

SEQ ID NO: 2385 - DNA, 510 bp, Homo sapiens
ggaaaactttgcaatgcaacaactgcgtagctggcttagaggacagccaatacagatggaacagaaagatgaggatgggattgagggatcagggattgaggtctccaagaataaaaagggacttcatggaaaaagtaggcttgtggataattaatcacaggggcaaataatgcagttaaaataacaacatgacaatcaggtggaggaatgtataataaacccaaatgtggctgggtagagtggctcacacctgtaatcccagcactttgggaggccaagccgggcagattacctgaggtcaggagttcgagaccagcttggccaacatggcgaaaccccgtctctactaaaaatacaaaaattagccaggcttgggggcgcacgcctgtagtcccagctcctcaggagctgaggtaggagaatcacttgaacccaggaggcaaagggtgcagggagttgagccaagatcgcgccattgcaccctagcctgggcaacagagcgagattctg

SEQ ID NO: 2386 - DNA, 186 bp, Homo sapiens
aatcaaccaacaagtcattattaccctcactgtcaacccaacacaggcatgctcataaggaaaggttaaaaaaagtaaaaggaactcggcaaatcttaccccgcctgtttaccaaaaacatcacctctagcatcaccagtattagaggcaccgcctgcccagtgacacatgtttaacggccgcggt

SEQ ID NO: 2387 - DNA, 536 bp, Homo sapiens
attttattcagtagttgtcattgctctttggtttagaccaagaaaaaggaaatccccccttttcatgtattccttggtttgaggacatgactcctgtaagggagaggaaagggagatgcttcctgtttgaactgcagtgaattcacggttcctgtttcaccactccaaaccttatggcgactcacacacacattcctcttttctgttactgccaaaggttcgggtttagtacacttcagttccactcaagcattgaaaaggttctcgtggagtctggggcgtgcccagtgaaaagatggggactttttaattgtccacagacctctctatacctgctttgcaaaaattacaatggagtaactatttttaaagcttatttttcaattcataaaaaagacatttattttcagtcaaatggatgatgtctccctcttttcccctattctcaatgtttgcttgaatcttttattattttttttaattctcccccatacccacttcctgatactttggttctctttcctgctcaggtccct

SEQ ID NO: 2388 - DNA, 300 bp, Homo sapiens
accattggtggccaattgatttgatggtaagggagggatcgttgacctcgtctgttatgtaaaggatgcgtagggatgggagggcgatgaggactaggatgatggcgggcaggatagttcagacggtttctatttcctgagcgtctgagatgttagtattagttagttttgttgtgagtgttaggaaagggcatacaggactaggaagcagataaggaaaatgattatgagggcgtgatcatgaaaggtgataagctcttctatgataggggaagtagcgtcttgtagacctacttgcgc

SEQ ID NO: 2389 - DNA, 346 bp, Homo sapiens
acaacagcttcttaactctacacacgcacttaaatttttttaaaggaaaaacgttatgtcttattacaccatgatcctggctaatagcttttcaaaactttgagaaaaatcttaaaaaaggtttcacatgtcacctgaaacttacaaatttaacattatcaaagaaggaatgcttctacactcttacaaagaccactagaaagaaacaacaattaaaaagctaagaaactgtctcaaaggcatttttttttacaatccttcctccacagtaaggtaatgttattaaataatccaatccattcacaaaatggctctctgcatctgctctggtgtcttctgccatatc

SEQ ID NO: 2390 - DNA, 286 bp, Homo sapiens
acaataatgatttcagtgtattacatagactagttctagggtgatattgtcaggaataaatatgaatacctgaaattaggaaagttttatgtaaggcagaatagttgattttttgttttttgttttttttgagacggagtctcgctctgtggcccaggctggagtgcagtggctgcgatctcggctcactgcaagctctgcctcccagattcatgccattctcctgcctcagcctcccaagtagctgggactacaggcacatgccaccacgcccggctaatttttt

SEQ ID NO: 2391 - DNA, 486 bp, Homo sapiens
accctgctgaactcatgcgcagatttgagctgtattttcaaggccctagcagcaacaagcctcgtgtgatccgggaagtgcgggctgactctgtggggaagttggtaactgtgcgtggaatcgtcactcgtgtctctgaagtcaaacccaagatggtggtggccacttacacttgtgaccagtgtggggcagagacctaccagccgatccagtctcccactttcatgcctctgatcatgtgcccaagccaggagtgccaaaccaaccgctcaggagggcggctgtatctgcagacacggggctccagattcatcaaattccaggagatgaagatgcaagaacatagtgatcaggtgcctgtgggaaatatccctcgtagtatcacggtgctggtagaaggagagaacacaaggattgcccagcctggagaccacgtcagcgtcactggtattttcttgccaatcctgcgcactgggttccgacagg

SEQ ID NO: 2392 - DNA, 279 bp, Homo sapiens
acttgagggaataagctctgaaggcccagatggttccttcaggtgctgcaggtagtcatagtcgtcatcaaagaacactccatacttcctctgttctgctcgcctttcttcattgtctattttttgtgtgggcaatagaaccctctggggtgcactctcatctgctgctaaaggatctcgttggctccggtggaccaagtgaaaagacacagctttcttcttctctataaagggctttttcttcctgtgaggcatgctgcagccgcgcggcgctcaccc

SEQ ID NO: 2393 - DNA, 458 bp, Homo sapiens
acttaaatgaagtatttggtaataatgtcagcttcagcctgcaaagtgttctagtcagcatagaaatctgaaagtctaaaattacttctgtatgttaattaaaactaactgctgtttgaatttgagtatgttttgtctggaggctagttggagatttttttctcccttctagcaacaaattggctaagtggtcaacctctgtggctcacagttttgtaaaaaaagcatacagaaaagaaactaggctgggcacagtggctcatgcctgtggtcctagcactttgggaggccaaggtgggaggctcatttgagcctgggagttgggaggctgtagtgagcaacgattgcgccactacactccagcctaggtgaccgagcaagacactgtctctcttaaaaaaggaagaaaaaaaagtaaaaaagaaaaaaatctggaatttggatattattctgatagt

SEQ ID NO: 2394 - DNA, 380 bp, Homo sapiens
  misc_feature 347: n = A,T,C or G
acaatctttatcttaagacttgagaactggaatgcaggaaaacaaactttggtggaatactggaataaaagacataaagctgggcagaactaggtgtggcaaccttgtatgttaattctgaaagccagaccagtgacgctaagaataacaaatagattcagatttgtttttcagaaacttgagctatttcggccaggtgcactgtctcacacctgtaatcccaacaatttaggaggtcaaggtgggagaatcacttgagcccaggagttcaagaccggcctaggcaacacagtgagaccctgtctccctgtctctacttcttttttttttttttttttttttttganacggagtcttgctcctgtcacccaggctagtgt

SEQ ID NO: 2395 - DNA, 521 bp, Homo sapiens
cgtggttccccgctaggtctccgctggggcaggaaccggaatcatgggtgggaccaccagcacccgccgggtcaccttcgaggcggacgagaatgagaacatcaccgtggtgaagggcatccggctttcggaaaatgtgattgatcgaatgaaggaatcctctccatctggttcgaagtctcagcggtattctggtgcttatggtgcctcagtttctgatgaagaattgaaaagaagagtagctgaggagctggcattggagcaagccaagaaagaatccgaagatcagaaacgactaaagcaagccaaagagctggaccgagagagggctgctgccaatgagcagttaaccagagccatccttcgggagaggatatgtagcgaggaggaacgcgctaaggcaaagcacctggctaggcagctggaagagaaagaccgagtgctaaagaagcaggatgcattctacaaagaacagctggctagactggaggagaggagctcagagttctacagagtcacca

SEQ ID NO: 2396 - DNA, 466 bp, Homo sapiens
  misc_feature 361, 404, 425: n = A,T,C or G
actccacttcttcctattggaagattaacattatttaccaagaaggacttaagggagtaaggggcgcagattagcattgctcaagagtatgtaaaaaaaaaaaaaaaaaaaaagaaccaaaccactggaaataatcaaatgcaaaaaggtaacaaattcataactggaaagcaaagagaagaacaagtatgatttggatgataaagcattgttttaatggtgaaaacttcacagatcactaatgtttctagaggttaacttcaagtgggcaagctggggtttttaggtagtcagtggcctagttcctaaagccacagtataggatctgttaaactgaatgtctgttgaaagtttgttttanctgcttggaggcttccttttaagacaaactgtatgtgattaangttgttttgagggaactgaanaacctgatgtagcccctggccagataactgcctgatttctc

SEQ ID NO: 2397 - DNA, 422 bp, Homo sapiens
ggcaaggccgaggataaggagtggatgcccgtcaccaagttgggccgcttggtcaaggacatgaagatcaagtccctggaggagatctatctcttctccctgcccattaaggaatcagagatcattgatttcttcctgggggcctctctcaaggatgaggttttgaagattatgccagtgcagaagcagacccgtgccggccagcgcaccaggttcaaggcatttgttgctatcggggactacaatggccacgtcggtctgggtgttaagtgctccaaggaggtggccaccgccatccgtggggccatcatcctggccaagctctccatcgtccccgtgcgcagaggctactgggggaacaagatcggcaagccccacactgtcccttgcaaggtgacaggccgctgcggctctgtgctggt

SEQ ID NO: 2398 - DNA, 497 bp, Homo sapiens
  misc_feature 473: n = A,T,C or G
acagctattggaatcagatgcaaagatggtgttgtctttggggtagaaaaattagtcctttctaaactttatgaagaaggttccaacaaaagactttttaatgttgatcggcatgttggaatggcagtagcaggtttgttggcagatgcccgttctttagcagacatagcaagagaagaagcttccaacttcagatctaactttggctacaacattccactaaaacatcttgcagacagagtggccatgtatgtgcatgcatatacactctacagtgctgttagaccttttggctgcagtttcatgttagggtcttacagtgtgaatgacggtgcgcaactctacatgattgacccatcaggtgtttcatacggttattggggctgtgccatcggcaaagccaggcaagctgcaaagacggaaatagagaagcttcagatgaaagaaatgacctgccgtgatatcgttaaagnagttgcaaaaataatttacatagt

SEQ ID NO: 2399 - DNA, 406 bp, Homo sapiens; identical to SEQ ID NO: 1724

SEQ ID NO: 2400 - DNA, 399 bp, Homo sapiens
acggccagggctattggttgaatgagtaggctgatggtttcgataataactagtatggggataaggggtgtaggtgtgccttgtggtaagaagtgggctagggcatttttaatcttagagcgaaagcctataatcactgcgcccgctcataaggggatggccatggctaggtttatagatagttgggtggttggtgtaaatgagtgaggcaggagtccgaggaggttagttgtggcaataaaaatgattaaggatactagtataagagatcaggttcgtcctttagtgttgtgtatggttatcatttgttttgaggttagtttgattagtcattgttgggtggtgattagtcggttgttgatgagatatttggaggtggggatcaatagagggggaaat

SEQ ID NO: 2401 - DNA, 125 bp, Homo sapiens
  misc_feature 121: n = A,T,C or G
cgagcggccgcccggcaagtgaaggaccaaatctccaacttatctgccacatacaaagcatcattccaggtgctagtgagggaaaaaaaagttggagatttggtccctcgaggagctccanatat

SEQ ID NO: 2402 - DNA, 153 bp, Homo sapiens
  misc_feature 38: n = A,T,C or G
acaagctttttttttttttttttttttttactctctanaaaatatttattgacacattttaattttctttccatattctgagaaataaacaaaatacacaaaatacagtaaaatgcacttttcccatttcaaataaatatactatactcttgt

SEQ ID NO: 2403 - DNA, 171 bp, Homo sapiens
accgaaccgcttacagttgctatggcacagtgtcttccttaaacggagagcccgaacaaggggttgccatggaagcggtgggccagaacgactgcagcatttacggagaagacaccgtgacagacgaagagggcaagttcagattacgtggattgctgccgggatgtgtgt

SEQ ID NO: 2404 - DNA, 491 bp, Homo sapiens
acatacgtgtcataaactggactttcttggctcaatgacaggtgtagaaaatcgtgattcttataagactatctcataaagtccaagaacaaacatattcaacaaaaaaaaaatctaaactatgcacttttgtttcttaaaaaacaaaacagtgtaaatcagattttaagctaggaagaggaaatccgttttttagcctcgcggctgtatccatcctcctgttcagctgaacggatgaagcacaatagcgacaactttgttacagactaaaatccaacaggtaattccaacaccacctgctactctagtaggaaaggctaccaggcggtctagaggggttatccatttactcggcacgacagccacagggacagaataatacttccaaatgagtgagatcatcagggcggcctgcaatacgtagaaagcgacacttatcacccattttatcttggctaattgagctgtccgagctttcacatgggttttga

SEQ ID NO: 2405 - DNA, 420 bp, Homo sapiens
acttctgtgtatgaggggagacaagtgttaaaaaacaaaacaaaagaaccaaacactgtgacaccatgatctcctaaaaggagattttcttaaggaaaaaaatccatatggtggggttcaaattaaaacaaggggtaaagaatgtagttctaatcaatggtttccgttttgaacatgcaaagaattcacttgacaagtccagggataaaatattacaggagaaaccttttgatatcaattgtagtgtgttggtttaccaatcaggcaaacagcagttcactttcaaccactcaatatttcaacctttcatgtaacaaaacttataaaattcctttagctcttcctttttctaaagaaaaatgtcaaaaatactgctgaatatactccacactgaacaaaccaattttgaaaattcttagt

SEQ ID NO: 2406 - DNA, 394 bp, Homo sapiens
ccgggcaggtccgagcctgacatcatggccacaaatggcgtggtccatgtcatcaccaatgttctgcagcctccagccaacagacctcaggaaagaggggatgaacttgcagactctgcgcttgagatcttcaaacaagcatcagcgttttccagggcttcccagaggtctgtgcgactagcccctgtctatcaaaagttattagagaggatgaagcattagcttgaagcactacaggaggaatgcaccacggcagctctccgccaatttctctcagatttccacagagactgtttgaatgttttcaaaaccaagtatcacactttaatgtacatgggccgcaccataatgagatgtgagccttgtgcatgtgggggaggagggagagagatgt

SEQ ID NO: 2407 - DNA, 455 bp, Homo sapiens
acagtgctccactctgctggggtatcactctccgtctggctgcgttaactcctcccagagcccgcacttttacactgtatctaccattcgtgtcataagttgtgaaataccttgagtagacaccgtcatccttagtagcatcagcacctgctccattatccagtagttccaaggtaactgtttttccattcactgattcaatcagggctgtgacactggccctgagaattggggaggctccttggcgaatatttgcataaactaccagagggctggggaatttgctggtgtccttgttcgttttggaagtcactgtaattggaggcagggtagcattggacgcacgggacgtgacagtcagggtcaaggtttgtgagcttgcttgcagactgtatttccaagtgccaaccttagcaatgcctgggatttggaggtaggccattttggtgtttttg

SEQ ID NO: 2408 - DNA, 492 bp, Homo sapiens
actctgccttttaggagatgaggtaagacatatacatagatggcttttactagccaaggcaatgtaaatggactaagattctcatgtgacttgaggttatctgatgaatttattctcttcaaaaccacctacttttagagggcatgtttaacccctctctttatttaaggagggagagaaaaacacatgtaaccagaattcagagtgggttactcaacctaagagaacatacggagttctctttgggaaaacaacaagactacagtgttcacttcgcaccatgaagtggcactcctgttatggctgtcagagtcctctcacttcttatgaaaggatgcatctgattctgaaattactgatatattcgatcagttagggatgttttaaaaagtgaaaacaaatgccacacatacactttctagctttctgaaatcaccgaacacattacaaaaaatagagaatttaccctattaacttttagagaattttcca

SEQ ID NO: 2409 - DNA, 538 bp, Homo sapiens
  misc_feature 505: n = A,T,C or G
acatagtttagcagggctaattagcataagatgctatttattaagaggtatatgatctgagtattaacagttgctgaagtttggtatttttatgcagcattttctttttgctttgataacactacagaacccttaaggacactgaaaattagtaagtaaagttcagaaacattagctgctcaatcaaatctctacataacactatagtaattaaaacgttaaaaaaaagtgttgaaatctgcactagtatagaccgctcctgtcaggataagactgctttggaacagaaagggaaaaaacagctttgagtttctttgtgctgataggaggaaaggctgaattaccttgttgcctctccctaatgattggcaggtcaggtaaatgccagaacatattccaactcaacaactctaggtaactttatggaggtggaagctgggttagttcatgctaggtggctgtagcactgacctcatgtataaaacgcaaaacacttaaatactgngatctaggtcttaattgcaagctatactgagga

SEQ ID NO: 2410 - DNA, 535 bp, Homo sapiens
  misc_feature 520: n = A,T,C or G
gtgtgtatgaaaagaaactgttaaacctaactgtccgaattgacatcatggagaaggataccatttcttacactgaactggacttcgagctgatcaaggtagaagtgaaggagatggaaaaactggtcatacagctgaaggagagttttggtggaagctcagaaattgttgaccagctggaggtggagataagaaatatgactctcttggtagagaagcttgagacactagacaaaaacaatgtccttgccattcgccgagaaatcgtggctctgaagaccaagctgaaagagtgtgaggcctctaaagatcaaaacacccctgtcgtccaccctcctcccactccagggagctgtggtcatggtggtgtggtgaacatcagcaaaccgtctgtggttcagctcaactggagagggttttcttatctatatggtgcttggggtagggattactctccccagcatccaaacaaaggactgtattgggtggcgccattgaatacagatgggagactgttggnagtattatagactgt

SEQ ID NO: 2411 - DNA, 538 bp, Homo sapiens
  misc_feature 520: n = A,T,C or G
acatggcgccagcactggggttggtgagcatgtgctctctcttgagattaggagcttccttactgctcctctgggtgatccaagtgtagtgggaccccctactagggttaggaagtggacactaacatctgtgcaggtgttgacttgaaaaataaagtgttgattggctagaactgctgcctccctgactgtgagctgccttccacaccctgcactgcactgtgttctctcctcacccttaacctgcttcactccagtctgttctggctgtttattaccttgttgcaaaacagggccgaagcaaggattaccttgacaaccctagcttctccttagccatcttccttgacagtgtgatctgtttagtgagatttagcatgtgtgaataaagtatatgcaggaggaaattgctttgtcttcccaatcggtagaaattcgggaccataaaaattgtgttttaccatgtggcctacaaccttaacactgctttcttaagaagtcttcacccatctacatgctnacaactcactcagcctgg

SEQ ID NO: 2412 - DNA, 236 bp, Homo sapiens
cggccgaggtacagagaggattctataaagttcacactttttcattaagtagtagtagaaatacggtgaggccctgagactggcctggtgagcgaggaaaggccgctgggcgcttccactctgcaggccggggctgaaataacccgagttccgttctcacagaaaggtgcggctgccacctcttgacacagaggccggatgggcaggtgtcctcgatggccaggccgtatcagggt

SEQ ID NO: 2413 - DNA, 162 bp, Homo sapiens
acagatgccattacttctgctttcgtatctcctcaggcaaaagtggagggtgccttatgggccctcctcataggttgtctctgcatacacgaacctaacccaaatttgctttggtgccagaaaaactgagctatgtttgaacaaagatgtcgtgcaaactgt

SEQ ID NO: 2414 - DNA, 376 bp, Homo sapiens
acggatgctacttgtccaatgatggtaaaagggtagcttactggttgtcctccgattcaggttagaatgaggaggtctgcggctaggagtcaataaagtgattggcttagtgggcgaaatattatgctttgttgtttggatatatggaggatggggattattgctaggatgaggatggatagtaatagggcaaggacgcctcctagtttgttagggacggatcggagaattgtgtaggcgaataggaaatatcattcgggcttgatgtggggaggggtgtttaaggggttggctagggtataattgtctgggtcgcctaggaggtctggtgagaatagtgttaatgtcattaaggagagaaggaagagaagtaagc

SEQ ID NO: 2415 - DNA, 580 bp, Homo sapiens
  misc_feature 474, 529: n = A,T,C or G
tgctgaagaagaccggcgaaagaaggaacgagttgaagcagttaatatggctgaaggaatcattcacgacacagaaaccaagatggaagaattcaaggaccaattacctgctgatgagtgcaacaagctgaaagaagagatttccaaaatgagggagctcctggctagaaaagacagcgaaacaggagaaaatattagacaggcagcatcctctcttcagcaggcatcactgaagctgttcgaaatggcatacaaaaagatggcatctgagcgagaaggctctggaagttctggcactggggaacaaaaggaagatcaaaaggaggaaaaacagtaataatagcagaaattttgaagccagaaggacaacatatgaagcttaggagtgaagagacttcctgagcagaaatgggcgaacttcagtctttttactgtgtttttgcagtattctatatataatttccttaatttgtnaatttagtgaccattagctagtgatcatttaatggacagtgattctaacagtatnaagttcacaatattctatgtccctagcctgtcatttttcagctgcatgtaa

SEQ ID NO: 2416 - DNA, 366 bp, Homo sapiens
acgcaaggcagggcacttccagaatacctcctcccccagcgcccgctgccagccccacaccaggtgtgagaaccaaggtctggtggaggcagctccaggcactgcccagtccgacacaacctgcaaaaatccattagagccactgcccccagagatgtcaggaaccatgctgatgctggccgttctgctgccactggccttctttctgctccttgccaccgtcttctcctgcatctggaagagccacccttctctctgcaggaaactgggatcgctgctcaagaggcgtccgcagggagagggacccaatcctgtagctggaagctgggagcctccgaaggcccatccatacttccctgacttggt

SEQ ID NO: 2417 - DNA, 204 bp, Homo sapiens
  misc_feature 31, 33, 42, 76, 130, 154: n = A,T,C or G
caagctttttttttttttttttttttttttngnatcataaanagtgttgaagtttatttattatagcaccattganacattttgaaattggaattggtaaaaaaataaaacaaaaagcatttgaattgtntttggtggaacagcaaaaaaaganaagtatcatttttctttgtcaaattatactgtttccaaacattttggaaa

SEQ ID NO: 2418 - DNA, 400 bp, Homo sapiens
cagacattcacctgtatatttcttttaatgggcacaaaatgggcccttgcctctaaatagcactttttggggttcaagaagtaatcagtatgcaaagcaatcttttatacaataattgaagtgttccctttttcataattactctacttcccagtaaccctaaggaagttgctaacttaaaaaactgcatcccacgttctgttaatttagtaaataaacaagtcaaagacttgtggaaaataggaagtgaacccatattttaaattctcataagtagcattcatgtaataaacaggtttttagtttgttcttcagattgatagggagttttaaagaaattttagtagttactaaaattatgttactgtatttttcagaaatcaaactgcctatgaaaagt

SEQ ID NO: 2419 - DNA, 375 bp, Homo sapiens
actgaaatggggactacaggggaagcagcttccagttttatggtggagagtcagtcctgaatcaggccctggggcaattataaccagagtgctgtttctagccacttacttcaaaggactatggctatgttgaatcagaagccattatctttttcccagaggatgcacttccatccctatttctggcatgatcctgctccctacgagcctgatcctttaaaaaacagattggcaagcgacgagaaaaacggtgcctcacatgcttgagatgtgacagcttctcctgcaggcaagaacctctcagaacaaggtcctttggtatgagctagatcatccaggcctgtccctgcagaacacaccaagactcatccctgt

SEQ ID NO: 2420 - DNA, 247 bp, Homo sapiens
acagctggctctacttccccatggccctgagcgagtggagtctgccacccaggatccccaaggcacttgagggggaaggattctgctggcctctgcgagtggtttcttgtgcactggcaccaagtgcgggtccggcggcttctgccccctgcagaaccggagagccagctaaggggtggggctgcgggggttccgtgtccacccccatacatttatttctgtaaataatgtgcactgaataaattgt

SEQ ID NO: 2421 - DNA, 479 bp, Homo sapiens
acacctaagccatcctcttcaaaatcttcagaaacttctggctgagataattccatttttcttttggaaaatggaattttcctatgttttcgtttggataaacgtaattctggccactcagaggatgctaaaagagactggttcctgacggcttcttggggctccccctgccagctcatgtagggcaggaagtctacatcttctttggcaataagttcagaaacttttggaatatcaggaaaaggcgactcattctcatcccttttctcaactgccacaaagcttgtaaattgtgttatgagagagttttctttactgagtttaataatcagagatttcaaggtttgttttttcatctcatgactggtttcattttcgtgaagaatgccatcttcataatctctgattagagctcgggctgccagcttgtggatcatagttccagttgtcttctgaagctcagtagtcgacaccattgt

SEQ ID NO: 2422 - DNA, 127 bp, Homo sapiens
  misc_feature 67, 79, 100, 114: n = A,T,C or G
acaagctttttttttttttttttttttttttttttttttttttttttttttttttttttttgggctntaaagggggtanagggggtgctatagggtaaanacaggccctatttnaaaaatttttagg

SEQ ID NO: 2423 - DNA, 193 bp, Homo sapiens
  misc_feature 41, 49, 68, 131, 141, 154: n = A,T,C or G
acaagctttttttttttttttttttttttttttttttacgngttgtcgngcaggtagaggcttactanaagtgtgaaaacgtaggcttggattaaggcgacagcgatttctgggatagtcagtaaaattanaattgtgaanatgataagtgtanagggaaggttaatggttgatattgctaggacctgcccgg

SEQ ID NO: 2424 - DNA, 526 bp, Homo sapiens
  misc_feature 510, 521: n = A,T,C or G
gcaggtacgtttaattcaccacagaggagctaaaagaaaagagagggggttggtaaaatacagtatactttctttaaaaaagacttgggaggaaaaaaatcaacttagaagatcatatgaaagggcaatcacatggaacccagttagtgtcctagtttattactagtcttcagattcagaaaacagagtaagacactaggtaaacagaacacctaggcacatctgtaaggcatttgtttcctatcacacagcccattctagcttaacacccaccaactgagatgtagtgaaatactaaaactggatgctcaaattatgtttttatctaaccaaaaagttctttaaatataaaattcctcactttaaactctgccttgtcttctgtgataccaacagaactttaaggttttacatatgcaatatgatgatttcgtgttacttttaaaagaacccacaaagtaagcaattgtccacagatgaaacatgggatgaggttcatgactgaatcantcatggagtgntagtc

SEQ ID NO: 2425 - DNA, 303 bp, Homo sapiens
acttaaaaatactgaattgacagctacattgaatgcagggtttcccagggtagttcttattttgtcacttactccaattacattcaaggtcgttatgcctcatctttttcctgagctgtggcagctctaactggggcacccagagagatacataccaggtaatctccacttctacttttctggtagcttggccctggcaaaatgagccccacaatctagaaagtaggatgctaaacaaagttgaatcaacatatctttttagaaaatatcaggttagagaatactcctgaggacctgtttcta

SEQ ID NO: 2426 - DNA, 422 bp, Homo sapiens
acttctagacaacgtatgtaaatttacagtatacaatttggattcaccatgcatgaatactttgtgtgtaacatttaataagctcaatctacatccagaataatttacatgaaaggacaatatttatttaaacagagctcaatggggtaaccatggtatcatcagagtgcatccagaggaaaagagggaggaggggccgaaggagacacaatcaacggcactcccacacttttactgtttgatctacgctgccagtgacgacatagggtgccgtcttgtggaaatccaaggaggtaacaaagtgttcatgcgcattgagggtcttcatgcatcgcttgttcttgtaattccatacgcgtagggtcttgtcatcagcacaactcaaaataaacttccccccagaatgggacagaactccacgt

SEQ ID NO: 2427 - DNA, 492 bp, Homo sapiens
  misc_feature 440: n = A,T,C or G
ctgactaaaaatgaagtaatacccttaaaccatttataatttctagtatttctctgaaagatcgttttggggacaaaagtgacttgacatgtccaatttcatttcagaataaaaagctagcatctttaaaaatctcagattgcttgcttacagatacaagtaagaattatggacaaacgattccttttagaggattaattttttcaatttcggttttagtaatctaggctttgcctgtaaagaatacaacgatggattttaaatactgtttgtggaatgtgtttaaaggattgattctagaacctttgtatatttgatagtatttctaactttcatttctttactgtttgcagttaatgttcatgttctgctatgcaatcgtttatatgcacgtttctttaatttttttagattttcctggatgtatagtttaaacaacnaaaagtctatttaaaactgtagcagtagtttacagttctagcaaagaggaaa

SEQ ID NO: 2428 - DNA, 375 bp, Homo sapiens
  misc_feature 372, 373: n = A,T,C or G
gttttctcagtgccgtaatatagaggaattctcaaaataagccctactccttttcacttactgaaaacaacttggataatgtgtaacagccagccccatttcaaaaagattaccaggggtaaaacaactttttcatgggtcaaaatcatcttccgaagaaaatgatttcttaaaagaattgaacattgtaaatcaaagggcattgtcctgttttggattaacaaaacaggaaaaataaccaatccttgtaaaattatttgaaattttcttgtttttatcagttgagtgcctatagatgcacatacaaaaacaactgccatttttgtatataatagtcttccaagatagagatttacattaggagagaattannca

SEQ ID NO: 2429 - DNA, 340 bp, Homo sapiens
  misc_feature 32, 37, 39, 104, 117, 133, 137, 170: n = A,T,C or G
acaagctttttttttttttttttttttttttngatananagggggtcccaccatgtttcccaggctggtctcaaactcctggactcaagcaacacacccgcctnaaactcccaaagngctgggattacaggtntganccaccatgcccagccaaaagttctggacatganaaagctatcctgattactcaaggaatctactgatcatctcccaattaggtttttttaaaaaaataaactataattcttcaaactaataaccagttcaccaactgtaatgtcaatatactttaaacacaaaattcaaattatttctgatactttatctgatggaaaatttt

SEQ ID NO: 2430 - DNA, 443 bp, Homo sapiens
acatattagtcccttggcaaatctgttctttcaaagcataccttccccaaatgagcctacctacttcttaaaaaacatataacacaatgtggtagtagtaggtgtaaggaaggtaagttttttcatagtggtatgcaaacatatcattgaaatattacatagatataaagacttagggaataaaaatagcagcaacaaatacttgatagatttatcccacttgggagaaatattttgtagtagagtatttagtatacttagaagttgatttagcaattaggctttaatgaccttacaaagtgaacataactgaacacaagtattttttcaatgcaagatgaggatgaaaattttacatttcaacccatctggctaaagttaagacttagcaaaaattaaaatgttgcctttgtccaagtatagattaaggcaacaaacatatt

SEQ ID NO: 2431 - DNA, 513 bp, Homo sapiens
  misc_feature 68, 70, 86, 141, 143, 154, 166, 173, 247, 250, 298, 329,339, 348, 396, 430, 433, 503, 507: n = A,T,C or G
acaagctttttttttttttttttttttttttttttacattttattcacatttatttttcgcttttagngngctcacagaaaattanaacaccttaagcaggagtttaatagcaatttttgtaagcaaagttacattccatntntaagtcaaatnggtcaaagcttntccagtntttacaaaacatgatagacaagatgctacacaaaaccattgcatctgaagattttttttcctttattctcaaanacnactggaaaaaaaagcattatctgctgtaatcaaaaacataccacagtntaaacagtaaccattccacttatcacagctnggttgagttnaaaatttgngttttaaaaggtccaaaatgactgcagttttacaaaaatgggcagggnggaaagttgcaaacttcatgtgcttctggatatnaanatttgtttttatacaatagtcacagttaaaaacaccctgctgggaatacataattacactttattaaggncatnaaccag

SEQ ID NO: 2432 - DNA, 420 bp, Homo sapiens
acttttgtgtatgaggggaggcaagtgttaaaaaacaaaacaaaagaaccaaacactgtgacaccatgatctcctaaaaggagattttcttaaggaaaaaaatccatatggtggggttcaaattaaaacaaggggtaaagaatgtagttctaatcaatggtttccgttttgaacatgcaaagaattcacttgacaagtccagggataaaatattacaggagaaaccttttgatatcaattgtagtgtgttggtttaccaatcaggcaaacagcagttcactttcaaccactcaatatttcaacctttcatgtaacaaaacttataaaattcctttagctcttcctttttctaaagaaaaatgtcaaaaatactgctgaatatactccacactgaacaaaccaattttgaaaattcttagt

SEQ ID NO: 2433 - DNA, 418 bp, Homo sapiens
actctgaggcttgtaggagggtaaaatagagacccagtaaaattgtaataagcagtgcttgaattatttggtttcggttgttttctattagactatggtgagctcaggtgattgatactcctgatgcgagtaatacggatgtgtttaggagtgggacttctaggggatttagcggggtgatgcctgttgggggccagtgccctcctaattggggggtaggggctaggctggagtggtaaaaggctcagaaaaatcctgcgaagaaaaaaacttctgaggtaataaataggattatcccgtatcgaaggcctttttggacaggtggtgtgtggtggccttggtatgtgctttctcgtgttacatcgcgccatcattggtatatggttagtgtgttggttagtaggcctagtatgaggag

SEQ ID NO: 2434 - DNA, 499 bp, Homo sapiens
accagtagatcagctgcctagcgagggcaggtttcttctttgcatctgtgtggcttgcttccagtctggcctgtcctttccagctgccttttgtctagcctgctatggggggccagattatcttgataagagcaggtgatttggggactagctgggttggcaggaaaagagcaggatggatctcttgggacaggttcccccaggagtataaacacaaggagccaggattgtgctggcagccaaggaaacagtagtgcctgtttgagttggcagagagggccttggcacctcttgcatccaggcagtcttgtgagatgggggcacatagcactggggaaagcagaactccattctcacctctattttgagcttcagtgctttatttcagtatgaggaaaaacaacaacaaactgaagtgcgctttccgtcctttcaaaggacaactgtcgggaagggagagccgagttgcgaggtaggaggggagcactggcagggagag

SEQ ID NO: 2435 - DNA, 497 bp, Homo sapiens
acaggtgaccaccggagtgcacaggggctccagctctgtggccatgggccccatccccagggagccactgtgcagaggctcccagtctgctgcatagaaggacccagataggtccatgtctggcacggagcgggctgtctcagagccactgggcctggatgatgctgggaacaggaagtcatcaaagggctcggtcttcagctccatgctgctgatgctcttgacaggttccactgagggcttgggctcagggtcattgaggagaggcagggtgaaggcctcctcagactccggggtggcaacctctggcaggcccccagtcagatcaagggaagccacagacatctcttctgggaagcccaggtcatcagggatcttgcaggcaggtcggtgagctgccaggatgaactctagttttcccttctccttcagcaggttggcaattctcggtctgcaaagcagacttctcatcttctagttggtctgtctccgcttgg

SEQ ID NO: 2436 - DNA, 440 bp, Homo sapiens
  misc_feature 90, 152, 181, 194, 198, 267, 434: n = A,T,C or G
acaagcttttttttttttttttttttttttttttaaaagttataaaataaaatttattatgcaatactttctcataatgaattgcatctntttggtaaaaataaactttataaacattttaataatcagagattagatacaaaaactaagtntttgtaagttgtttttaatatgagcaaanattggcaactganaagnggttcacttgtgactggtcatctactggcagttataactcaaaccgggacaatttttatgctacatcanaaaagaggataaggaaacagtttgataacaaatttgttgaatcaaaaggcattcttacactttcatttaaaaataaataatagttacaatcaattggcaattatacatttttatacactatatgatggcaacataatactttaaaattaagcacttagtttaataanaaatgt

SEQ ID NO: 2437 - DNA, 358 bp, Homo sapiens
ctgagcctggccctgaagcgtttttctcaaaggccctcagtgagataaattagatttggcatctcctgtcctgggccagggatctctctacaagagcccctgcccctctgttggaggcacagttttagaataaggaggaggagggagaagagaaaatgtaaaggagggagatctttcccaggccgcaccatttctgtcactcacatggacccaagataaaagaatggccaaaccctcacaacccctgatgtttgaagagttccaagttgaagggaaacaaagaagtgtttgatggtgccagagaggggctgctctccagaaagctaaaatttaatttcttttttcctctgagttctgt

SEQ ID NO: 2438 - DNA, 446 bp, Homo sapiens
  misc_feature 31, 39, 112, 205, 218, 261, 313, 315, 344, 370, 392, 403,430, 436: n = A,T,C or G
acaagcttttttttttttttttttttttttnggcttggnggtttcctctttattgatgtgcctcctaccttccccccacaatttcagtcccttccaactacccccaaaaaanagggtagtgaaaggaagggattgctggggttctgagccccttgggcagtcagaaagggaacagaaaccaaaacaatcactggatgtgacacanactgacaatcaanaagtctacagcaggatgggaaaggcgggcagagaaaggggaanaaaggagaaaggagagttacaagatgccaactccaccattacccctcctaananaggctggagagaaagccacaaacattaanaagtgccggtcctgaataagggaggnggtgtttgagcttgaaggaggnaggaggtcaanaaaggggggccacctctctctttgtanaatganacccccctcc

SEQ ID NO: 2439 - DNA, 320 bp, Homo sapiens
  misc_feature 149, 206, 244, 280, 292, 299, 306, 312, 313: n = A,T,C or G
acttaagcatttccacttttggaagaaaagtgtattagtattttatattgcatttcatttaaaaggacagttttttttttttttgtaaatccattcattgaaatggtttctaaactgtataatgtaatttggagcctatttagtaatanaattaaatgtcctatgtagtgctacaatttttgaattagaaagtgatcaaatgtaanaaaaaaatttaaaaattcagcccagaaaacaaaatagngtattaaattagtttaatgtaaaaggaatttataanatttttttcctnaatatanatacctnacttgnnaagaaag

SEQ ID NO: 2440 - DNA, 579 bp, Homo sapiens
acttcaaatcacatagcttaaaatatggagaaaagacaggtaaaaaaattatcttaacctgtagtagtcttttttctttttaaaatttttataaaatacactaatttcccaaaataaagaatattatgacacattggtgtcaacttacacagatgaaagctgatgccagctttttcctaactaaagttcatttcaccaaacctttatatattacatgaatatccaagtaaagtatttttttttttaaattcaacacacaggaacataatatacattgtttttttttaaaaaaaggttaatttaggaatgatttcatcttcaaccacataaagtatctttttaagaccatgaaacctcttgtcattgcaagacttttcagttcatgtttctatttcccagttttagttcttaaaggaaaaaaaaagatgaaagggtttattatgtatttcccatgagaaaactgtggtaaggatcttattcattaccaggctgtcttccctccttttgttttccggactacccagatccatgactgcgtggcaccgtaatgaaatcggtgggagaggccaatgacatcaa

SEQ ID NO: 2441 - DNA, 280 bp, Homo sapiens
acttatatagtcagcaccccagaagtcctacatatagtcatcgcccaccaaaggttgactgctctcctgatttctaacactagattcattttgtctgtttttgaactttatataaaagagattttgcaggatacaccctgttagcttctttcactgaacatgggtttgtggctttaagcacatttttgcataccataatagttgtttgttctcattttatgtagtatcccattcaatgaataagccacaattttttaattcatctactattaatggatat

SEQ ID NO: 2442 - DNA, 464 bp, Homo sapiens
accttatgtttgacaacaaaaaggaaattacatctgtaactgcaagaaaaagaagctggtctgttatttgaaaaaaaaaaaaaaaaaaaaaaatcttgggccctttaaaaattacaaagtcttgggcttgcctgaaacaactgagcaagaaatatattcttagaaatgtagggcttcaagtattacaaacctgtgacactgtggaaaaattccagaggtatctaaactgcagcacttttttttctgcatatcgtgaacaaggcctgctgaggtttttaactattagtcttttgatcagtcatagaatggtagtcaggagttctgctctttaacttcaagccatggtagattttccttttttcactcttgggtgaaaaattcatgcttgctaattagttggtgccacatcacagtgcatttggttcttgcattacagttttaacaagtttggccaaacaatgctg

SEQ ID NO: 2443 - DNA, 463 bp, Homo sapiens
  misc_feature 360: n = A,T,C or G
acatttggacggcgacaccttgtttgcagaatcctgcattacttaacccccgaagtgaatcacacaaaatggctgtaaccaggatctgtttgaagacacagatgcaaacggccattagcttaaagacgtcaaggttgtgacagcaactacagtggaagggacgtcaccatctcctttggcatcaactattatgctattaatacttgggtaggacaatgagcaaaatgcttcccaagttcgctccctctcagctttggcagatgtgaagctgctctgaggttcctgacacgctgtcctgagaggcgtgtagacctccagcaccacagatcctttgagcaccaccccgtccccgccatcctncatcaacagtggccctgcccaccacataagcacagggttctccagccgtggggtcagggtggcattgagggagtgtcttaaggctccacaaaatctgggctac

SEQ ID NO: 2444 - DNA, 556 bp, Homo sapiens
cccagtcagaatagaacagcataattacctggagttagggggagtatttctgcactattacttgtcagggagagaagaaacttagaattgtccctcaaaggagtgtcaagaagtatgaataaatgtcctttcaccagctcacaggccagaaatggaggacccaagtcaactaggtgaaactactagcagacccagctttcccataataacctaatctgcaaattgttctattaaagtctcattgttttcaggatgcaatgaaagtggatttcaaaaggctttggaaaaataagtggaacatgactgatcttgaaaaaaaaagcaaaagcttaaatatttgatacaagtttacttagctacaacatactttacattgttgcctttagttatctcacaggcactgacattttatatttagaaaatacttttaatctttctaatctttttttgtaaatattagtgtccattctgtatgactcgctaacctactttgcaaggctttgggcaacattttagctcattaacttcaagatgatgtgtcatctgtataggtcaa

SEQ ID NO: 2445 - DNA, 301 bp, Homo sapiens
actgaatctttgatgttttttgtcattgttctcaagtgcaatataacaatgtaaccaaatctagataatttcaaagttgtcattaatttagtaagcctaatataaacaaatatttgtattatttttgttagcaggaaagagtgattaagtgaggttatttacccctaaatggtccattctttaccagttttgaaacactttgatatactacacagcttccaagttaccttaggatatttcaaagtgtttcaaaactggtaaagaataattcatttccagcctgaaatacaatgcagaatgg

SEQ ID NO: 2446 - DNA, 411 bp, Homo sapiens
acggccagggctattggttgaatgagtaggctgatggtttcgataataactagtatggggataaggggtgtaggtgtgccttgtggtaagaagtgggctagggcatttttaatcttagagcgaaagcctataatcactgcgcccgctcataaggggatggccatggctaggtttatagatagttgggtggttggtgtaaatgagtgaggcaggagtccgaggaggttagttgtggcaataaaaatgattaaggatactagtataagagatcaggttcgtcctttagtgttgtgtatggttattatttgttttgaggttagtttgattagtcattgttgggtggtgattagtcggttgttgatgagatatttggaggtggggatcaatagagggggaaatagaatgatcagt

SEQ ID NO: 2447 - DNA, 453 bp, Homo sapiens
acagcattctggaataaagcaagagtgttcattcacacacacagtagcttcaaaactgttcgatctgtttgttcccatgtagttttctaaagatggaaaaaaaggactttggtcatcaagactactgtggccatattagattactggaacatctaagcatcagtgtgtgaccatgcgaacaaaagacttcggggagtgtctatttttaaaaaggtttatgtgtgtcgaggcagttgtaaaagatttactgcagaatcaagcccacttttaggcttaggaccaggttctaactatctaaaaatattgactgataacaaaaagtgttctaaatgtggctattctgatccatagttgttttttaaagaaaaaaatgtatatacagaaagagtataaaagtttgtgaatttaatgcaaattagcttccagtcttcacttcccaaatacttgatttat

SEQ ID NO: 2448 - DNA, 309 bp, Homo sapiens
actggggttcttttaagccccgtaggtctgtagaatattttaaaaggctagaattacctcaaaaatagtcttgaaataatactgagtccttctaaagagctcactggatattttaataacatttacagaaagacaaaatttgcagtagctgagtttaagtggagaataatgtagaactaacgtgggctaaaatgtttcataattaatgtcaaaaattgccaagattattaatatatattttggtaatcactattgaccaggttaatttttttgtgcaaaatacactatgtattaatagaacaggaaaat

SEQ ID NO: 2449 - DNA, 186 bp, Homo sapiens
acagagccagttgtccaggagaatggggacgaagctggggaggggagagaggctaaagattgtgaccccggctctccaaggaggtgtgacatcatcatcatctctggccggaaagaaaagtgtgaggctgccaaggaagctctggaggcattggttcctgtcaccattgaagtagaggtgcccttt

SEQ ID NO: 2450 - DNA, 553 bp, Homo sapiens
  misc_feature 489: n = A,T,C or G
acaaagtattagtgataacacaacattcagcttcctaagagttaaaacgtgctgcttacatgaagggagatgatactgagctaagaagtcctggtatagagaagcagagagaccaacctacttcatattatttataaaatagagaatattctcagctaacatgctgggagaaaaaattcttccaaaaaggcagaattacaatcaatgccaagatttacaaattccatcatgtttaaatataaggacaaaaataaacatttcttatttaaaaaaaacccacaaatttccccaactatagcttatctgttagcacttctttatcagtctgactattctttaaaggccttaaaacatgaatttgggataaaaacaaataaaagtgcccaagttttaagaagccatatgttaacttaggatgttatctatatattttttagaccaatcaatgttttttaagaggtgtagatactggtaacttttctctttaanaaatgtttatatatttcaccaacaacactggcctgtggcacacagcatgtttaataaaaacaca

SEQ ID NO: 2451 - DNA, 491 bp, Homo sapiens
acttcagttggtgcacaaaatactgtcatttgctcaaagctggctgccaaatgtttggtgatgaaggcagaaatgaatggctcaaaacttgggagaagagcaaaacctgaaggggccctccagaacaatgatgggctttatgatcctgactgcgatgagagcgggctctttaaggccaagcagtgcaacggcacctccatgtgctggtgtgtgaacactgctggggtcagaagaacagacaaggacactgaaataacctgctctgagcgagtgagaacctactggatcatcattgaactaaaacacaaagcaagagaaaaaccttatgatagtaaaagtttgcggactgcacttcagaaggagatcacaacgcgttatcaactggatccaaaatttatcacgagtattttgtatgagaataatgttatcactattgatctggttcaaaattcttctcaaaaaactcagaatgatgtggacatagctgatgt

SEQ ID NO: 2452 - DNA, 343 bp, Homo sapiens
  misc_feature 81, 186, 217, 220, 241, 262, 265, 298, 310, 343: n = A,T,C or G
acaagcctttttttttttttttttttttttttctttttattcggttcagtctaatcctttttgtagtcactcataggccanacttagggctaggatgatgattaataagagggatgacataactattagtggcaggttagttgtttgtagggctcatggtaggggtaaaaggagggcaatttctanatcaaataataagaaggtaatagctactaanaanaattttatggaaaaagggacncgggcgggggatatagggtcnaanccgcactcgtaaggggtggatttttctatgtanccgttgagttgnggtagtcaaaatgtaataattattagtagtaan

SEQ ID NO: 2453 - DNA, 443 bp, Homo sapiens
  misc_feature 354, 363, 396, 408, 426, 436: n = A,T,C or G
acgcctcaacctcaagtgggaaatgtgaggcagaactgatatccatgttaacagggaatcgacacttctcagaaacttggcaacgattctacattcagtgagggaggacttgtcagagtcagacaggaaaagcagagagcggcccacgccccagttgcagcactctggcgcccttggtcatggaggtgtgggtggagcaattcaagcagcatgcaggcattggacgggaaataatccagcgttaggtcagtcttaagaaagtgcttcatgcctatgatttgtggccttgggttctgaatccaggggtctgagagacatgtgacttgaaaatatgaagccagatacattctccanatcagagtnaaagggggtctattgggggttgcatacacagtntcaaactccttntcctgatggtcatcttanatcctgttanacttgct

SEQ ID NO: 2454 - DNA, 392 bp, Homo sapiens
ggactccacctcagacctgatcccagccccacctctgagcaaggtccctctgcagcagaacttccaggacaaccaattccaggggaagtggtatgtggtaggcctggcagggaatgcaattctcagagaagacaaagacccgcaaaagatgtatgccaccatctatgagctgaaagaagacaagagctacaatgtcacctccgtcctgtttaggaaaaagaagtgtgactactggatcaggacttttgttccaggttgccagcccagcgagttcacgctgggcaacattaagagttaccctggattaacgagttacctcgtccgagtggtgagcaccaactacaaccagcatgctatggtgttcttcaagaaagtttctcaaaacagggagt

SEQ ID NO: 2455 - DNA, 445 bp, Homo sapiens
  misc_feature 398, 399: n = A,T,C or G
acaacaggcagcaagccatgtatttaccatggcgagggtcacatttcaccatctggttggctggctcaaagcaagcattggtgatctctgctacagaaagctgttcatggtaggctttctcagcagagatgacaggggcatatgtggccagagggaagtggatgcgggggtagggcaccaggttggtctggaattctgtcaggtcaacattcagggctccatcaaatctcagggaagcagtgatggaggacacaatctggctaataaggcggttaaggttagtgtaggttgggcgctcgatatcgaggtttctacgacagatgtcatagatggcctcattgtctaccatgaaggcacaatcagagtgctccagggtggtgtgggtggtgaggatggannttgtagggctcaactacagctgtggaaacctggggtgctgggtaaa

SEQ ID NO: 2456 - DNA, 411 bp, Homo sapiens
acttaatattacctgagtttgaaatggatgaagacagctgctaccattaaggaccaaattttatgctaccactaaacaaaaatacccactcagtctgtgttaaattgtatgtctttttaaaggtatttaaagattcaactaagctttaaagagggctgagcagctcaggaagcctgtaatgtgggcataactctttggacctgatcttgatgcttctgctgctctgttagcctctgaagagcaatatctaatttattattactgtaattttttaaaaggctttaaagtgcctcaggggtcccctgaaactaattttctatttctgggattccctggattcattatatgagatggtgacatgattagaggaattcttttttagtatgaaaattgtcccttttcttcttcagt

SEQ ID NO: 2457 - DNA, 338 bp, Homo sapiens
acttaaaaagttttttaaaaaataattaaatgcactactcatctcaatgaaatttttcgttttcctattttctagaactttctaaaaaaggaaacaaagcaaaaacaacaacaaaaaaacctgtttgacttaaggacacttgctgatcttgacacttgataatactttaagaaatggaaaggttttcctaaatctaatacctgcttaatataatccactttggaagattcatctgaaagaaacatagggtttgatttttaatactaatataaaataatctgccttccaatcaaaacaaaaatgttttcaactgtatacgctcctcggttgtgttttgt

SEQ ID NO: 2458 - DNA, 216 bp, Homo sapiens
  misc_feature 150, 202: n = A,T,C or G
gctatatctgctgaatgatcattgattactcttatccttagagataacaactgggggcacaaacatttattatcattattgaacctacaacagagatctatgtgtagatttacaaagcctacagttctatacagataggaatgaactatnggcttactgaatggtgattactttctgtggggctcggaactacatgccctangatataaaaatgat

SEQ ID NO: 2459 - DNA, 313 bp, Homo sapiens
  misc_feature 147, 303: n = A,T,C or G
acgtaaaaagaacatccttcccatcttcaaggtcaagattgaacgctgactcctgcaggaagtcttccaggattcccaggcaggaatgatggctccctgtccctgtagctccaggagttcttgcttcacgcacgcctcacataccanactgaatgttggcaggaggagtgaccaggtcggtcatctgtgtccctaccacctacaacaggccagcaatctacccgtgtgtgtttgttggacagaattaaccatgatgggcggccgagggcgcctggagctatttgggggcttggagagaacctnttaggagagt

SEQ ID NO: 2460 - DNA, 176 bp, Homo sapiens
  misc_feature 75, 127, 139, 142, 151: n = A,T,C or G
gggcaaggtcatccctgagctgaacgggaagctcactggcatggccttccgtgtccccactgccaacgtgtcagnggtggacctgacctgccgtctagaaaaacctgccaaatatgatgacatcaanaaggtggtgaancangccgtcggngggccccctcaagggcatcctgggc

SEQ ID NO: 2461 - DNA, 283 bp, Homo sapiens
  misc_feature 262, 269: n = A,T,C or G
actgccagcatggcgtgaaggaaggggccacactggtctgcggcgggaatcaggtccctcggccagggttcttctttgagccaactgttttcacagacgtggaagaccacatattcatagccaaggaggagtccttcgggcctgtcatgatcatctctcggtttgctgatggggacttggatgccgtgctgtctcgggccaatgccacggaatttggcctggcttctggtgtcttcaccagggacatcaacaaggccctgtntgtcagngacaagctccaggc

SEQ ID NO: 2462 - DNA, 466 bp, Homo sapiens
acaaatctggggtttggccattaaaagttatttacaacagtgggagaaaaaaagacaagaagttgtttcacattacagacctccccccaccccaaagcctaatacttgcttaccaagtcaaaaaagagacgcagttgattcacaggctggaggtttgaacttgagtaagacatttataaaaacctagacggggcagtgtcctccccagcccaggtgccactaggcacagcacaagagactaaaaacaacaggggaaggctggacactcaaggtttgggagtataagcaccccacttctggctcagggatttggggagtagggtaaacaaaacctacttggaaaagaattggggaagaaaaccaacaactgccttatgcaggggtggggacagggaaggaggtagggccagggacaggagcatttcacatcactaacctaacttgggaagctgtaagggaccatctt

SEQ ID NO: 2463 - DNA, 338 bp, Homo sapiens
acggtagaactgctattattcatcctatgtgggtaattgaggagtatgctaagattttgcgtagctgggtttggtttaatccacctcaactgcctgctatgatggataagattgagagagtgaggagaaggcttacgtctagtgagggagagatttggtatatgattgagatgggggctagtttttgtcatgtgagaagaagcaggccggatgtcagaggggtgccttgggtaacctctgggactcagaagtgaaagggggctattcctagttttattgctatagccattatgattattaatgatgagtattgattggtagtattggttatggttcat

SEQ ID NO: 2464 - DNA, 278 bp, Homo sapiens
ctccccccgagcgccgctccggctgcaccgcgctcgctccgagtttcaggctcgtgctaagctagcgccgtcgtcgtctcccttcagtcgccatcatgattatctaccgggacctcatcagccacgatgagatgttctccgacatctacaagatccgggagatcgcggacgggttgtgcctggaggtggaggggaagatggtcagtaggacagaaggtaacattgatgactcgctcattggtggaaatgcctccgctgaaggccccgagggcgaaggt

SEQ ID NO: 2465 - DNA, 331 bp, Homo sapiens
acgtgcagaagccagggcagtctccgcagctcctgatctacacgctttcctatcgggcctctggagtcccagacaggttcagtggcagtgggtcaggcactgatttcacactgaaaatcagcagggtggaggctgaggatgttggagtttattactgcatgcaacgtatggacttcccttatacttttggccaggggaccaagctggagatcaaacgaactgtggctgcaccatctgtcttcatcttcccgccatctgatgagcagttgaaatctggaactgcctctgttgtgtgcctgctgaataacttctatcccagagaggccaaagt

SEQ ID NO: 2466 - DNA, 575 bp, Homo sapiens
  misc_feature 487, 532, 533, 563: n = A,T,C or G
acttttaaggcataataagggttaacattctaggcagtataaacacaccccataatgcaagtaataggtaatctagagatgtggactttattgctatatgggaattacatttaaatttgagggcattttatataaagaaaaatacagacctataaagtttggcatattcattaagttatcttttaatatttttttctagaaaacaggtgacatttgtatctacgataaaaatttttatacagaacctactgcctcaaactgaatcccatcaagaaaactagtttctattgtattagtaactcaaaataaattatcacttcgaaaacttgctttcccacactaaggtaagttcagactagattgaacactccagaattttttactacagactgtttttaagttagaagtgatggcaattttataaatagagaatatacttccactgatgcccttactgtgccaaaacaaaaatcttaagaaaagcaangtagacaccttcataactatgaatgaagctgctgaagtagtgttnnggatcctccatggcagttagtgaatgtaangaagtacctgcc

SEQ ID NO: 2467 - DNA, 295 bp, Homo sapiens
accattggtggccaattgatttgatggtaagggagggatcgttgacctcgtctgttatgtaaaggatgcgtagggatgggagggcgatgaggactaggatgatggcgggcaggatagttcagacggtttctatttcctgagcgtctgagatgttagtattagttagttttgttgtgagtgttaggaaaagggcatacaggactaggaagcagataaggaaaatgattatgagggcgtgatcatgaaaggtgataagctcttctatgataggggaagtagcgtcttgtagacctac

SEQ ID NO: 2468 - DNA, 263 bp, Homo sapiens
acggatgctacttgtccaatgatggtaaaagggtagcttactggttgtcctccgattcaggttagaatgaggaggtctgcggctaggagtcaataaagtgattggcttagtgggcgaaatattatgctttgttgtttggatatatggaggatggggattattgctaggatgaggatggatagtaatagggcaaggacgcctcctagcttgttagggacggatcggagaattgtgtaggcgaataggaaatatcattcgggctt

SEQ ID NO: 2469 - DNA, 308 bp, Homo sapiens
acggatgctacttgtccaatgatggtaaaagggtagcttactggttgtcctccgattcaggttagaatgaggaggcctgcggctaggagtcaataaagtgattggcttagtgggcgaaatattatgctttgttgtttggatatatggaggatggggattattgctaggatgaggatggatagtaatagggcaaggacgcctcctagtttgttagggacggatcggagaattgtgtaggcgaataggaaatatcattcgggcttgatgtggggaggggtgtttaaggggttggctagggtataattgtc

SEQ ID NO: 2470 - DNA, 480 bp, Homo sapiens
acacttgaaaccaaatttctaaaacttgtttttcttaaaaaatagttgttgtaacattaaaccataacctaatcagtgtgttcactatgcttccacactagccagtcttctcacacttcttctggtttcaagtctcaaggcctgacagacagaagggcttggagattttttttctttacaattcagtcttcagcaacttgagagctttcttcatgttgtcaagcaacagagctgtatctgcaggttcgtaagcatagagacggtttgaatatcttccagtgatatcggctctaactgtcagagatgggtcaacaaacataatcctggggacatactggccatcaggagaaaggtgtttgtcagttgtttcataaaccagattgaggaggacaaactgctctgccaatttctggatttctttattttcagcaaacactttctttaaagcttgactgtgtgggcactcatccaagtgatgaa

SEQ ID NO: 2471 - DNA, 512 bp, Homo sapiens
acagtatttcaacaaaacaacttttctaaaaggtcgtaggcaaatgagtgattagtctcactcagaatatttaattggtttaaaatgagaaaatgaatcttttttctctgaagacataacttttaaaatcatctgacaactgacacttcactctgatgtccttgggatttgaaaatatcccagtgatggccgcatcttccctatcataaaaaaatctaaacactaaggctattcttacaactggaatataacaagcttcttccctgttaataagccatctcttctaaaaaaattttacacaaatttgatcaaacaagggggtcagtgcacacattttgaaagacagcttcagagcgtggagatgctgaagcggaggcgtgggggtttcagcagggaccacctgccatcagcgtgtcattgaacgcactggcgaagtgatgagcacagttacaaagggatcacatttcagaggagctgatgataaacagctggggtatctctgagttaactga

SEQ ID NO: 2472 - DNA, 414 bp, Homo sapiens
acagctggatttaaattttccattatacattttaaaattctatgtctatcttcttttacagaatccctcctatactactttttataagttaatattttctaaaataatgtattattatctttaatgatttttccctctattatatgaaaatcctttttagtggttgcagtagggcttttttttataattgacaagtaataattgtatataattccagggaactatctgatgtttttgtatgtatacatagtgtaataactaaatcaagcacattaacatatccataacttcacctacttttgttgtgacaactttaatatctacttataacaattttaaaatatacagtcagtgacaatggtcaccatgctgtgaaatatgtctaaaacttattcctcctaacagaaaattggt

SEQ ID NO: 2473 - DNA, 313 bp, Homo sapiens
acaggcatcacaggcagaaaaaaacagagctgcagcaatggcaaacaatttacaaaagggaagtgctggacctatgaggctttatgtgggctcattacacttcaacataactgaagatatgcttcgtgggatctttgagccttttggaagaattgaaagtatccagctgatgatggacagtgaaactggtcgatccaagggatatggatttattacattttctgactcagaatgtgccaaaaaggctttggaacaacttaatggatttgaactagcaggaagaccaatgaaagttggtcatgttactgaacgt

SEQ ID NO: 2474 - DNA, 598 bp, Homo sapiens
actggaagtttttatgctatatgttttatgaaaattcagacttctgattatacattaaaaattgacattttgcactacagggtatcaataattctgattttaaaaatatttttatgatggctccatgaattcaaaaataataaaacataaaaggtggtttgactaaatagaatctgattcaaataatttccccctaaataagaaattgtaagatataatttttgagcctataagggacacatgtatcagttcccaattctatatgtctcggtgggcattgaacaaaaattgtttgctaagcctttgtttccagcaaggtccacatcatttcttttcacagtttgatggagcaataatagtcacgattctgatgagcctagttctacaattctagctccatggatcttagattcgtagaaagttttccctcctttgaagaaactcattgacagctttcttatatttgtttatgactcattggcctcaaagtcacatatcagaacactgggaaaaatttttaatgatgaaaagttcttgttctaggcattcttttgtaagctttacttctctactatccaaaatagaagaaacacatgtg

SEQ ID NO: 2475 - DNA, 345 bp, Homo sapiens
acgaattaaagaccgcaataaactttctacagaggaacgccggaagttgtttgagcaagaggtggctcaacgggaggctcagaaacaacagcaacagatgcagaacctgggaatgacatcaccactgccctatgactctcttggttataatgccccgcatcatccctttgctggttacccaccaggttatcccatgcaggcctatgtggatcccagcaaccctaatgctggaaaggtgctcctgcccacacccagcatggacccagtgtgttctcctgctccttatgatcatgctcagcccttggtgggacattctacagaacccctttctgcccctccaccagt

SEQ ID NO: 2476 - DNA, 490 bp, Homo sapiens
cgctctcagctctcggcgcacggcccagcttccttcaaaatgtctactgttcacgaaatcctgtgcaagctcagcttggagggtgatcactctacacccccaagtgcatatgggtctgtcaaagcctatactaactttgatgctgagcgggatgctttgaacattgaaacagccatcaagaccaaaggtgtggatgaggtcaccattgtcaacattttgaccaaccgcagcaatacacagagacaggatattgccttcgcctaccagagaaggaccaaaaaggaacttgcatcagcactgaagtcagccttatctggccacctggagacggtgattttgggcctattgaagacacctgctcagtatgacgcttctgagctaaaagcttccatgaaggggctgggaaccgacgaggactctctcattgagatcatctgctccagaaccaaccaggagctgcaggaaattaacagagtctacaaggaaatgt

SEQ ID NO: 2477 - DNA, 149 bp, Homo sapiens
actcccctaacctcttttctgcatcatctgtagatactagctatctaggtggagttgaaagagttaagaatgtcgattaaaatcactctcagtgcttcttactattaagcagtaaaaactgttctctattagactttagaaataaatgt

SEQ ID NO: 2478 - DNA, 286 bp, Homo sapiens
  misc_feature 174, 237, 251, 252, 283: n = A,T,C or G
acacagaaaaatatctgatactacaaacaggatataatcttaactttgatctcagtttctgttgcttcatgtcacagagaaaacagagcaggaaaatggcaagtaaaacagaagtgcacattgcactaagctatcgtaaagcacaggaaacaatcttttcaaaatgtctacacntgaactgattctttaaaacgattcactaactgttgtaagagttagtgctcccattactacagngcaaaatgtattgnngtttcaatacaaaatttaaagcaatctcaanagt

SEQ ID NO: 2479 - DNA, 360 bp, Homo sapiens
  misc_feature 254: n = A,T,C or G
acttaaaaatgttcaaataacctggttgggtgtggtggctcacacttgtaatcccagcactttgaggtgggcaatggcttgagcccaggagttcgacaccagcctggccaacacagtgaaatgtgtctctacttacaaaaaaaaaaaaaaaaaaaaagccaggcatggtggtgggctactctggaggcccttgaggatcacttgagcccaggagattgaggctgcagtgagccatgactgtgccactgcacctntagtctgggtgacagagcaagaccctgtttaaaaaagaaaaaggccaggcacggtggctcatgcctgtaatcccagctacgcaggaggccaaggcaggagaatcac

SEQ ID NO: 2480 - DNA, 348 bp, Homo sapiens
  misc_feature 325, 338: n = A,T,C or G
acccatggtaaatgtaaatatactgtgtctcttttgggagagccttttagtagaggagtcttatatgagtctctacataagtagtttcacttgagttttgcagtttgaaatcttaaaggagctttaattgacatttattataccaattaagcttggaatggggcaatggatgcatttcccaaaacgtgtgaaagcactaacagcttatattgctgaatgagaatctcctgggtgtaatttagccacttagggaactgcgtgaacactcccaggccattatgatgctgctacagcttcagtgtataaatgcatgagtattctttcntgttctgttttgngctctcttgt

SEQ ID NO: 2481 - DNA, 376 bp, Homo sapiens
  misc_feature 320, 371: n = A,T,C or G
acggatgctacttgtccaatgatggtaaaagggtagcttactggttgtcctccgattcaggttagaatgaggaggtctgcggctaggagtcaataaagtgattggcttagtgggcgaaatattatgctttgttgtttggatatatggaggatggggattattgctaggatgaggatggatagtaatagggcaaggacgcctcctagtttgttagggacggatcggagaattgtgtaggcgaataggaaatatcattcgggcttgatgtggggaggggtgtttaaggggttggctagggtataattgtctgggtcgcctangaggtctggtgagaatagtgttaatgtcattaaggagagaaggaagagaanttaag

SEQ ID NO: 2482 - DNA, 396 bp, Homo sapiens
  misc_feature 154, 385: n = A,T,C or G
actctctgagcccaatatacagagaaaggaggaaaaaagctagaattctatgcactactacacaggggcctagcaccctccagcttccagcagagcgaagggagcaggtttttcttttttcccacagagctcggtggtgttgattccatacagnttttgttcagacaggaagggataaaaatgaacttcgaacagaaaggggtagagactcttttcccattgtattctgctcaaggtatttccccccaaataaattgagaaccatggagtagagaaaagagacctcaagaacagggcgactgagcacaagagggaaaaaaaaaaaaaaaaaaaaaagactgcaacttgctcccagggactggagaaaatttaaaaaaaggaaggntggaatccatc

SEQ ID NO: 2483 - DNA, 383 bp, Homo sapiens
actgagacccattggagcttgtggccagcatcccacctgcaccgttggtcaggtcactggcagagaaccttgtgccgttagacgtggaacctgccgtcgtgatgaacacgcctccaacagttccctgagccatttctgtcacgtatggctccagagccttggggaccagacttctggccattttaaggtcttcggcagagcagctccccgactccagcccgcaagccatgcccatccgcttcagcacttctatgtcatcgtggatttcaaatgtgttgtcaaaattaaacagatactcaaatttgtcattggagatgctgcagtcgatgaccgtcttcttgctggtgttgacgatgatgaagggcaggtggatgactgagttg

SEQ ID NO: 2484 - DNA, 457 bp, Homo sapiens
acaagatttttaaggagagttaacaaaggtttaaatagatgacaaaaagggacttggtgacagatagtatttgccaatcaaattattcaacaggttttgaagggcgtgtgctaaacttctaaggtgaatcctgacgtggattactggattaccttttttgttgttttatttcacccaagtgcgtctatgtcatttacctaagtttttatgtgtggagtattctttgtaggagaggaaagataacagctgtagtctgattaacagtttttagtgtctcacaatgaaaaataaataatgtgacttaaacattttgcatacttaaatttacatagagttttagcaagaaaataaggcatgactgataatggctcaggaaagttctaaatggtgtaacagactagatcttattaaagttccaaagaatttattatcaaaactaaaacaaaacttcagttgt

SEQ ID NO: 2485 - DNA, 377 bp, Homo sapiens
cactcttctctcttggcagatgttttcttaaagtgaacacaccagaagcactctaccccaccatatccagtcctctttgcatgcctgttgtgtgcagggtggagggtgtcccacgtgccagagcagctgggagccctgtccgctgagttacactaagcactttatttttatttattttattattattttcttttttctgagatggagtctcactctgttgcccaggctggagtgcagtggtgcagtctcagcccactgcaacctccgcctcccaagttcaggcaattctcgctgcctcagcctcccgagtagctgggactacaggcacctgctaccacgcctgactaatttttgtatttttagtagagatggggttt

SEQ ID NO: 2486 - DNA, 351 bp, Homo sapiens
cctctgaggcttgtaggagggtaaaatagagacccagtaaaattgtaataagcagtgcttgaattatttggtttcggttgttttctattagactatggtgagctcaggtgattgatactcctgatgcgagtaatacggatgtgtttaggagtgggacttctaggggatttagcggggtgatgcctgttgggggccagtgccctcctaattggggggtaggggctaggctggagtggtaaaaggctcagaaaaatcctgcgaagaaaaaacttctgaggtaataaataggattatcccgtatcgaaggcctttttggacaggtggtgtgtggtggccttggtacctcggccg

SEQ ID NO: 2487 - DNA, 409 bp, Homo sapiens
acattaagtagttgtaggtaacctcataaaattctatcctactgctattagtaacctccccaagaattaagagcaattatattttttacaacagaacagtttttcttcttggaagtgacattaattaacagcagtggagggaaaaatcattggatgcttcaagctctgaaaaaaatgaatcagttattgcacagtaaatacctcatagaggtcagtgttttaagatgttagtctgaagaaatatgttatttataagttggataagtctggaagtcttcaagttttaaaattaattctaatagggaatcaaatgaaaaatattgacatacaaataaatattaggcttttcaaactgctagagtttttgatagtttagaaaagaaatagcaaagtgcctaagtttctatgt

SEQ ID NO: 2488 - DNA, 242 bp, Homo sapiens
ttttcgttaatgttagtaagggtggggaagcgaggttgacctgttagggtgagaagaattattcgagtgctataggcgcttgtcagggtggtagcgatgagagtaatagatagggctcaggcgtttgtgtatgatatgtttgcggtttcgatgatgtggtctttggagtagaaacctgtgaggaaaggtattcctgctaatgctaggctgccaatggtgcgggaggttgaagtgagaggtat

SEQ ID NO: 2489 - DNA, 290 bp, Homo sapiens
acatacctggctggattgagaatgatgaaatacaatggaatccaccaagacctgaaattaataaggatgatgttcaacacaagcaagtgtgtttcagcagaacatcctcgggaggctcatttgtggcttctgatgtcccaaatgctcccatacctgatctcttcccacctggccaaatcaccgacctgaaggcggaaattcacgggggcagtctcattaatctgacttggacagctcctggggatgattatgaccatggaacagctcacaagtatatcattcgaataagt

SEQ ID NO: 2490 - DNA, 441 bp, Homo sapiens
acattaaatgataatgtttgaagatcacacaaagatttcacaaaactataactaatacagaaagatgtgtgaaaacattaggggctttcaaaattttaggtatggaattttgcaaagattattttggcttataagtgttaggcaatcactaacctgaaataagtgacaaaaacatgcagatgattaccatttcaacaaatgaaaagctataaatgtctagctaaaagctaaaatattgtgtagctgaaatactaccatataacaatgggaatttataaaacaggaaaaaaggttattctttaaaagtcttccatgagtaatagactttcagtaattttctataaaaacattcagaaattaagtttctcaaattatgtttatcaccaaaattatgttttcagtagtgactggagctatgacttttaaataattatttattgt

SEQ ID NO: 2491 - DNA, 481 bp, Homo sapiens
acctgtgggtttattacctatgggtttatatcctcaaatacgacattctagtcaaagtcttggtaatataaccaatgttttcaaatgtattctgttatacaaagagcagatttttattgaacttgtgcaataactatattaccatacaatataaatattcatgaatagtttcccaagtctggagcgaccacatagggagaaaatgtaaatgtctcaatttttgttcacaaaagtatattttatcaaattgctgtaagctgtggatagcttaaaagaaaaaaagtttcctgaaatctgggaaacaagacatttaaagaatcagcaaaatttcaaataaaaaattatgaaaatattatcctcattagttcatttagtcccatgaaattaattattttctctgcttgatcttggtggacagtttcatgaagctgtcagttagttcattaaagttttggaaattctcagacagtgcagtggtatc

SEQ ID NO: 2492 - DNA, 376 bp, Homo sapiens
accaggcctattagaatgcttgggatcgaaggataaacatagttaggaagtaatattgaagagaggcaaggattactgagatatttattcattcaatcaatatctgaggtcttctgtatgccagacactgctctaggatgctaggaattcagagttggacttaccttcatggagactacatattattggtttagaaatcagggaaaaggagtgtttatgagatttaactaaaacatagttcaggatttgagctgagaaatgaattgtgcctttctcctcccagataaattagttaagtttccttcagcagctaaaaaagaaagagactaatgagtctaccaaatgagtccagggctaacctgagagtcactgaagt

SEQ ID NO: 2493 - DNA, 208 bp, Homo sapiens
  misc_feature 121, 147, 148, 149, 185: n = A,T,C or G
actgggattatataggcatgagccactgagcctggccctgaagcgtttttctcaaaggccctcagtgagataaattagatttggcatctcctgtcctgggccagggatctctctacaagantccctgcccctgtgttggaggcacannnttagaataaggaggaggagggagaagagaaaatgtnaaggagggagatctttcccaggc

SEQ ID NO: 2494 - DNA, 526 bp, Homo sapiens
acaggtcagagtcttcttttcttttctttttgagatggagtcttgctctgttgccagactggagtgcagtggtgcgatctgggctcactgcaatctccacctcccgggttcaagcgattctcctgcctcagcctcccgagtaactgggactacaggtgcgcgccaccaagcccagctcatttttgtatttttagtagagatggggtttcacgatgttggctaggatggtctcgatctctggtcagagtcctttctgtaaatatccttggtaaagaagcaattttagactgtagctgttgcaaatgctttaaggaagaagcaaaacaactgtcagtcttcctgaaatgaagaaactacaccagggctgctatatcagagcaaccccaaccagcactccaatcatgatgccgacagtggccccagctgagagaccaggagaagttccagatgcagagactgtgatgctcttgactatggaattattgcggccagtagccaagttagagacaaacaggcataggtcccg

SEQ ID NO: 2495 - DNA, 332 bp, Homo sapiens
actcaatattataaaaacctcaaataattgacttgattttacacaacatccttcccttttctacaagttaatttttttacaaatcatttgggttatctcctaaataggttatattttattgcttctagaaacaatgtttcaaaatatatgtgcattatcagtaataatttgtataaatatttcccacaacaattttcataattttcaaagactaatttcttgactgaagatattttgctagggaagtgaaactttaaaattttgtagattttaaaaaatattgttgaatggtgtcatgcaaaggatttatatagtgtgctcccactaactgt

SEQ ID NO: 2496 - DNA, 324 bp, Homo sapiens
  misc_feature 293: n = A,T,C or G
ggaaaatgaaaaaaaaagaaaaagaaaaaactaaacaaaaaatccctctaggtagtttaggtgaaaaatgtcccttttattttggctttggttgtgatttcagagcataatgctatgtttttttgtctttttactatgtttttcggatttttaagtccgtaagtgcatacagttttctctaatttttaaaccctttcctcctcccattttgacatttgcacttggagaacacttgagttgtgaaggttttgggcatccaccccagaaagtgggaatttgattttatccttccnaactggaagaacatttttatgaagaattttt

SEQ ID NO: 2497 - DNA, 379 bp, Homo sapiens
  misc_feature 127, 190, 260, 270, 288, 303, 354, 369: n = A,T,C or G
gcctgcagcaggtccctgagctgaagaaccggatcttctcggggggtctgagccccagcctgcggcgcgaggcctggaagttcctcctagggtacaagctttttttttttttttttttttttttttngctgataagaattcttttatgttattccaataaaaaatacattcatacagaaatataacaatnttgcaaaaaacaatttcaaataaaatcttgtaaaacaaaattttacaaaaatcttacaaagattctttanataacagggngcttccaaaaaaaaaaanaaatttcactaatanaaattttttttttaatttcaagcaaaaagtttctgcttgattgaggctcanttatcacctgaacanaatgtacttc

SEQ ID NO: 2498 - DNA, 255 bp, Homo sapiens
acaacagttgagagcagcaccaagtgcatttagttgaatgaagtcttcttggatttcacccaactaaaaggatttttaaaaataaataacagtcttacctaaattattaggtaatgaattgtagccagttgttaatatcttaatgcagatttttttaaaaaaaaacataaaatgatttatctgtattttaaaggatccaacagatcagtattttttcctgtgatgggttttttgaaatttgacacattaaaaggt

SEQ ID NO: 2499 - DNA, 472 bp, Homo sapiens
acttatttcaacaattcttagagatgctagctagtgttgaagctaaaaatagctttatttatgctgaattgtgattttttatgccaaattttttttagttctaatcattgatgatagcttggaaataaataattatgccatggcatttgacagttcattattcctataagaattaaattgagtttagagagaatggtggtgttgagctgattattaacagttactgaaatcaaatatttatttgttacattattccatttgtattttaggtttccttttacattctttttatatgcattctgacattacatattttttaagactatggaaataatttaaagatttaagctctggtggatgattatctgctaagtaagtctgaaaatgtaatattttgataatactgtaatatacctgtcacacaaatgcttttctaatgttttaaccttgagtattgcagttgctgctttgt

SEQ ID NO: 2500 - DNA, 523 bp, Homo sapiens
actttgttatttttccatcactaaaggccaatcagaatttggaaccatgctgctacccaagaaatctaatggaatgaattagttctgtagatgacaatttcttcacccatttatgagacctaaatcttttccataacactcatgtattcagtataacaacatactaactgaaagagggacctgattgtttaaagtttgattgcagacactgtagaacataactcattatgtttcagataaggtaactcctagatatcaaactaatttgttggggtagagattttacaagtcatgccattagaagattttctctgatattatatgtgcagttcagttacaagatgaaatcatgtttttttaacaaaagagataaaatacaattgaagcaaaaaataacagctagtatataatatatacagtctgtatttgcttttcacagtaggcctgatgactaaaagatatgctttattacacgctattttcacctcttgaaagtcaaaggtgatgattaatttcatttagc

SEQ ID NO: 2501 - DNA, 410 bp, Homo sapiens
acggccagggctattggttgaatgagtaggctgatggtttcgataataactagtatggggataaggggtgtaggtgtgccttgtggtaagaagtgggctagggcatttttaatcttagagcgaaagcctataatcactgcgcccgctcataaggggatggtcatggctaggtttatagatagttgggtggttggtgtaaatgagtgaggcaggagtccgaggaggttagttgtggcaataaaaatgattaaggatactagtataagagatcaggttcgtcctttagtgttgtgtatggttatcatttgttttgaggttagtttgattagtcattgttgggtggtgattagtcggttgttgatgagatattggaggtggggatcaatagagggggaaatagaatgatcagt

SEQ ID NO: 2502 - DNA, 342 bp, Homo sapiens
acgtaatatttattttaacttatgcaagggtgtgagatgttccccctgctgtaaatgcaggtctcttggtatttattgagctttgtgggactggtggaagcaggacacctggaactgcggcaaagtaggagaagaaatggggaggactcgggtgggggaggacgtcccggctgggatgaagtctggtggtgggtcgtaagtttaggaggtgactgcatcctccagcatctcaactccgtctgtctactgtgtgagacttcggcggaccattaggaatgagatccgtgagatccttccatcttcttgaagtcgcctttagggtggctgcgaggtagagggttg

SEQ ID NO: 2503 - DNA, 457 bp, Homo sapiens
actttcttataacaccatttagtagcagaacgtgcctggataattctagggtagtaagacctctgggacaccagccacttagagaagataacaggtatagttttttgttttttagggtttttttccaatgcccaagcagaggccactacacccagggatcaagtttatgggatgaggattatattttatcccgtttctatgacattgagctctacaccagggctcttgaatgtgaggcttagtttcagatcacaggcctggaagggggtcaggtcaagctgagcagaccttcaagccgattaacccaagagctgaattgtgttgtctgagggaaggagtcctctctggctgattattttctttacaccctggaaactttgcaaaattttataaccaagaaagaaatcttatcagggccacaagccaagttaattttcttgcttattctgcttcagtg

SEQ ID NO: 2504 - DNA, 381 bp, Homo sapiens
actacactgaattcacccccactgaaaaagatgagtatgcctgccgtgtgaaccatgtgactttgtcacagcccaagatagttaagtgggatcgagacatgtaagcagcatcatggaggtttgaagatgccgcatttggattggatgaattccaaattctgcttgcttgctttttaatattgatatgcttatacacttacactttatgcacaaaatgtagggttataataatgttaacatggacatgatcttctttataattctactttgagtgctgtctccatgtttgatgtatctgagcaggttgctccacaggtagctctaggagggctggcaacttagaggtggggagcagagaattctcttatccaacatcaacat

SEQ ID NO: 2505 - DNA, 300 bp, Homo sapiens
  misc_feature 25, 30, 146, 155, 174, 198, 208, 209, 240, 246, 292: n = A,T,C or G
aataatgttattgaaagccacacanagttnatatttaccaccataaaggctcccttgaaaccatatccagtttctccatcggataaagtccttattcaagaaaaaacacagttgaagggatctgaactggaaattacactcaccanaggatcttnccttcctggtcctgcttgngcatatgtcaatcttaacatttgngcaatggcanngaacaaggtggagtattgctcctggaaaatncaaaangtgacaataggttggaccttttaaagctgaagagtgttgtcactancatttttg

SEQ ID NO: 2506 - DNA, 377 bp, Homo sapiens
  misc_feature 224, 322, 325, 349, 352: n = A,T,C or G
cagtgaacatgatcctgacctttacctaggattcctcctgctccaaactttgcccatcctctttgccccctcaggagtgctgagggccagtgttgacccacactaccctcccttgaccagctgtctgggaccggaaaccagctttgtctccaggtagagacaacatcctgtgactgccaggcagaaaggacagggcccaggtcagcctcagtctgctgtgcctncagactgcagagctctcagaacccagaacagagacgaaaaggctacctctcctacccaagttaagtgttcaaaggggatgtgagggcctccactgaancanggaggcagctgtgtaatcctatgncancctctcttaggaagccccagtacct

SEQ ID NO: 2507 - DNA, 234 bp, Homo sapiens
  misc_feature 115, 127, 156, 160, 163, 208: n = A,T,C or G
acaagcttttttttttttttttttttttttttttttacattttaaagttgtttacttttattaataaaaagttagatcacttatatatatatacattgaaaaaaactattattgnccctttcctggngaaaaggagtatacacaacagacctttgngatnttntgcaacaatgacccatattgctggggaattctcactttttagtanaacctttaaaaactcaagtgagctgt

SEQ ID NO: 2508 - DNA, 383 bp, Homo sapiens
  misc_feature 267: n = A,T,C or G
attctatctctcaaaatgtcctgaaagcctccggactcgcaacgatgtgttctacctgcaacctgaacggtcctgcatcgccgagtcacctctctggtattctgtgatccccatggaccgcagcatgctggagagcatgctcaatcgcatcctggctgtgcgcgagatttatgaggaactgggtcgtcctggggaggaagacctggactgagctcgtgtgtcatccatatccatctttcacaccaatgtctgtcctgtggccatgtncctcagggtgacaggcccgggaaccaatgctactcattctgaagggccctgactgctcctttccgctcacccattccctgccttctctaggaaccctggcttttatcttcttccgt

SEQ ID NO: 2509 - DNA, 529 bp, Homo sapiens
ctcatgtgcagtagagatgcagtttcatcaaagaacaaacatccttgcaaatgggtgtgacgcggttccagatgtggatttggcaaaacctcatttaagtaaaaggttagcagagcaaagtgcggtgctttagctgctgcttgtgccgctgtggcgtcggggaggctcctgcctgagcttccttccccagctttgctgcctgagaggaaccagagcagacgcacaggccggaaaaggcgcatctaacgcgtatctaggctttggtaactgcggacaagttgcttttacctgatttgatgatacatttcattaaggttccagttataaatattttgttaatatttattaagtgactatagaatgcaactccatttaccagtaacttattttaaatatgcctagtaacacatatgtagtataatttctagaaacaaacatctaataagtatataatcctgtgaaaatatgaggcttgataatattaggttgtcacgatgaagcatgctagaagctgtaacagaatacatag

SEQ ID NO: 2510 - DNA, 140 bp, Homo sapiens
actataaccttgaaaattttcgacctggtgtctagtgttaagtgaaagtaatgcattttttttaagtgaaaagcttcttacattatttcacagacagtattacccaccccacattatgaatagttagatatattttatgt

SEQ ID NO: 2511 - DNA, 484 bp, Homo sapiens
acttcagttggtgcacaaaatactgtcatttgctcaaagctggctgccaaatgtttggtgatgaaggcagaaatgaatggctcaaaacttgggagaagagcaaaacctgaaggggccctccagaacaatgatgggctttatgatcctgactgcgatgagagcgggctctttaaggccaagcagtgcaacggcacctccatgtgctggtgtgtgaacactgctggggtcagaagaacagacaaggacactgaaataacctgctctgagcgagtgagaacctactggatcatcattgaactaaaacacaaagcaagagaaaaaccttatgatagtaaaagtttgcggactgcacttcagaaggagatcacaacgcgttatcaactggatccaaaatttatcacgagtattttgtatgagaataatgttatcactattgatctggttcaaaattcttctcaaaaaactcagaatgatgtggacatag

SEQ ID NO: 2512 - DNA, 512 bp, Homo sapiens
actcatgcccgactgtctaccaggcacacagactttgaggagagggcgtatgtcgtcttgatccgcatcaatgatgggggtcggccacccttggaaggcattgtttctttaccagttacattctgcagttgtgtggaaggaagttgtttccggccagcaggtcaccagactgggatacccactgtgggcatggcagttggtatactgctgaccacccttctggtgattggtataattttagcagttgtgtttatccgcataaagaaggataaaggcaaagataatgttgaaagtgctcaagcatctgaagtcaaacctctgagaagctgaatttgaaaaggaatgtttgaatttatatagcaagtgctatttcagcaacaaccatctcatcctattacttttcatctaacgtgcattataattttttaaacagatattccctcttgtcctttaatatttgctaaatatttcttttttggggtggagtcttgctctgtcgcccaggctggagt

SEQ ID NO: 2513 - DNA, 473 bp, Homo sapiens
acttatttcaacaattcttagagatgctagctagtgttgaagctaaaaatagctttatttatgctgaattgtgatttttttatgccaaattttttttagttctaatcattgatgatagcttggaaataaataattatgccatggcatttgacagttcattattcctataggaattaaattgagtttagagagaatggtggtgttgagctgattattaacagttactgaaatcaaatatttatttgttacattattccatttgtattttaggtttccttttacattctttttatatgcattctgacattacatattttttaagactatggaaataatttaaagatttaagctctggtggatgattatctgctaagtaagtctgaaaatgtaatattttgataatactgtaatatacctgtcacacaaatgcttttctaatgttttaaccttgagtattgcagttgctgctttgt

SEQ ID NO: 2514 - DNA, 319 bp, Homo sapiens
actgaataaaaaaataagtgttaagttcttgaccttttaaattagaattttataaagtgcttttcataaagtcttatatattatagtaattaagtggatataatttccttaacaaaggcaccttgaaaagttattggcacatgagattttgtctggtcttttttttttcttttgataatttcaaagtctcttcacatgtgttctcttccactttaagttttccttaacaattcatcatatgaatagccagcccttttagagaataaggtcaacttttttttttttttgaaacagagtctcgctctgtcacccaggctgg

SEQ ID NO: 2515 - DNA, 382 bp, Homo sapiens
  misc_feature 366: n = A,T,C or G
actctgaggcttgtaggagggtaaaatagagacccagtaaaattgtaataagcagtgcttgaattatttggtttcggttgttttctattagactatggtgagctcaggtgattgatactcctgatgcgagtaatacggatgtgtttaggagtgggacttctaggggatttagcggggtgatgcctgttgggggccagtgccctcctaattggggggtaggggctaggctggagtggtaaaaggctcagaaaaatcctgcgaagaaaaaaacttctgaggtaataaataggattatcccgtatcgaaggcctttttggacaggtggtgtgtggtggccttggtatgtgctttctcgtgttacatcgngccatcattggtatat

SEQ ID NO: 2516 - DNA, 122 bp, Homo sapiens
  misc_feature 26, 27, 28, 46, 47, 75, 77: n = A,T,C or G
atctgaaatactattaattagcaccnnngaattatgaacaaaacannacaaggacctcagttcatctctggctangncagcacctaacaatgtggatcacactcatgggaaagtgttgagag

SEQ ID NO: 2517 - DNA, 270 bp, Homo sapiens
accctagcctgcacctgtcctcatctctgcaaagttcagcttccttccccaggtctctgtgcactctgtcttggatgctctggggagctcatgggtggaggagtctccaccagagggaggctcaggggactggttgggccagggatgaatatttgagggataaaaattgtgtaagagccaaagaattggtagtagggggagaacagagaggagctgggctatgggaaatgatttgaataatggagctgggaatatggctggatatctggt

SEQ ID NO: 2518 - DNA, 160 bp, Homo sapiens
  misc_feature 36, 62: n = A,T,C or G
ttttttttttgctttcaagtttattaaagaagatcnttaaagatattgactagagaatgctngtgtgctatttcaattacatttgtttttcttttattaacaggaattttgattcttcaaggaagtggctcaatttcaatttcaggtgaccaggtttatc

SEQ ID NO: 2519 - DNA, 387 bp, Homo sapiens
ggatgtgttctctcaaaacatgttctgtgctggacacccatctctaaagcaggacgcctgccagggggatagtgggggcgtttttgcagtaagggacccgaacactgatcgctgggtggccacgggcatcgtgtcctggggcatcgggtgcagcaggggctatggcttctacaccaaagtgctcaactacgtggactggatcaagaaagagatggaggaggaggactgagcccagaattcactaggttcgaatccagagagcagtgtggaaaaaaaaaaaacaaaaaacaactgaccagttgttgataaccactaagagtctctattaaaattactgatgcagaaagaccgtgtgtgaaattctctttcctgtagtcccattgatgt

SEQ ID NO: 2520 - DNA, 346 bp, Homo sapiens
ggtgtttttaaatccaacaagatagagtataatatcaatactgctaaatctgcatgtcctctgtgtgactgatagagcgttgctatttcatttttttaagacaaaatgaaagcaaaatatagagttccaatgtattggtgtagataatctagttgggaatacttttaagtctcaccttcccctttaaactaatattcataattggttcatatgtttaaaagactttaatttacaaattaaattgcaaatgggagcattagatttagttttagacttaggtgggtagcaatgccagtaaacttaaattacgtaacttcttgcaaccacgaaacctgtaatacgctgt

SEQ ID NO: 2521 - DNA, 293 bp, Homo sapiens
gtcaaatgttatggcagggcccaaatagcatagccacaagtttggtttatgtgggcataaaattctaaccaaaccccagacatagggagtcatttggagaaagcctgtatgtggtgttttaacctaataaagttgatgagagagaaggggagaggaagcgaacataaagcgggtcaagtgtagtgcatcttttgtatctcaggcgtggcttcttcagtggaccaagctgcaatgcagtattgacttgacagagcctctacttctgtctcaaaatggctccaaatgatttctgt

SEQ ID NO: 2522 - DNA, 383 bp, Homo sapiens
actattgacccagcgatgggggcttcgacatgggctttagggagtcataagtggagtccgtaaagaggtatctttactataaaagctattgtgtaagctagtcatattaagttgttggctcaggagtttgatagttcttgggcagtgagagtgagtagtagaatgtttagtgagcctagggtgttgtgagtgtaaatcagtgcgatgagtaggggaagggagcctactagggtgtagaataggaagtatgtgcctgcgttcaggcgttctggctggttgcctcatcgggtgatgatagccaaggtggggataagtgtggtttcgaagagatataaaatatgattagttctgtggctgtgaatgttataattaaggagatttgt

SEQ ID NO: 2523 - DNA, 385 bp, Homo sapiens
tgatgccagcagctaggactgggagagataggagaagtaggactgctgtgattaggacggatcagacgaagaggggcgtttggtattgggttatggcagggggttttatattgataattgttgtgatgaaattgatggcccctaagatagaggagacacctgctaggtgtaaggagaagatggttaggtctacggaggctccagggtgggagtagttccctgctaagggagggtagactgttcaacctgttcctgctccggcctccactatagcagatgcgagcaggagtaggagagagggaggtaagagtcagaagcttatgttgtttatgcggggaaacgccatatcgggggcaccgattattaggggaactagtcagttgcc

SEQ ID NO: 2524 - DNA, 479 bp, Homo sapiens
  misc_feature 421, 451: n = A,T,C or G
actcaaacattttaagaaatgttttgatgccttaatcttcaccaaaggaatcaaacccaaatactaacttggccatatgtttaaataccactaaaggcagggaggtaaagtgttgtagggtgcttaaaatatactaagaagggatttggcaattttccattcacagtatttccaatataaaagactcatcctatttatcaaactcacaaaagttgggggaaaatatcacttgggaaaaaatttcactgaattgctatcaaaggaagcaatgaagttacttgacaaactattgacaggatgtctagttcaaaatagaatcttcattgaggctaactgtagcacagtatgtgatacataaacaaaattcaaatattaaaattctaaataaaaaaattttccccgctagtataaagtagaagtnctatagtggaaataacaatgaaaacagatnaaaaatcagtgaagaaatagagggaggt

SEQ ID NO: 2525 - DNA, 348 bp, Homo sapiens
gttggtttccttaaatatttttaattccttttctccttttcaatacaggttaaaggtgaatccttgtttcattctaagaaaatggacctgacagtaaatggggaacaactggatctggatcctggtcaaactttaatttattatgttgatgaaaaagcacctgaattctcaatgcagggtctaaaagctggtgttattgctgttattgtggttgtggtgatagcagttgttgctggaattgttgtgctggttatttccagaaagaagagaatggcaaagtatgagaaggctgagataaaggagatgggtgagatgcatagggaactcaatgcataactatataatttg

SEQ ID NO: 2526 - DNA, 548 bp, Homo sapiens
  misc_feature 520: n = A,T,C or G
tccattgtatttaaaccaaaatgaactgatacttgttggaatgtatgtgaactaattgcaattatattagagcatattactgtagtgctgaatgagcaggggcattgcctgcaaggagaggagacccttggaattgttttgcacaggtgtgtctggtgaggagtttttcagtgtgtgtctcttccttccctttcttcctccttcccttattgtagtgccttatatgataatgtagtggttaatagagtttacagtgagcttgccttaggatggaccagcaagcccccgtggaccctaagttgttcaccgggatttatcagaacaggattagtagctgtattgtgtaatgcattgttctcagtttccctgccaacattgaaaaataaaaacagcagcttttctcctttaccaccacctctacccctttccattttggattctcggctgagttctcacagaagcattttccccatgtggctctctcactgtgcgttgctaccttgcttctgtgagaattcangaagcaggtgagaggagtcaagccaata

SEQ ID NO: 2527 - DNA, 282 bp, Homo sapiens
  misc_feature 251: n = A,T,C or G
acttcacctccagaaccttgttcttcaccgactgagggatgtcgggcacgaaccaggcggcgatgagcttgatgcacaaggccacgtgctcaaagaggatgacgaaggccaggcggatggccaggaggaaccagaactgctcggagaagttgtaatcggggggattgcggtagtccctgtatctgcacagagtcacgttttctgagccctcaatcccatcagggtcctggaagtccttggtgtggaagacngacaggctgtggttgacgtagcccttgaggc

SEQ ID NO: 2528 - DNA, 417 bp, Homo sapiens
  misc_feature 388, 404: n = A,T,C or G
cgtggtcttgcgagtggagtgtccgctgtgcccgggcctgcaccatgagcgtcccggccttcatcgacatcagtgaagaagatcaggctgctgagcttcgtgcttatctgaaatctaaaggagctgagatttcagaagagaactcggaaggtggacttcatgttgatttagctcaaattattgaagcctgtgatgtgtgtctgaaggaggatgataaagatgttgaaagtgtgatgaacagtgtggtatccctactcttgatcctggaaccagacaagcaagaagctttgattgaaagcctatgtgaaaagctggtcaaatttcgcgaaggtgaacgcccgtctctgagactgcagttgttaagcaccttttccacgggatggataanaatactcctgtaaganacacagtgtattg

SEQ ID NO: 2529 - DNA, 496 bp, Homo sapiens
  misc_feature 480: n = A,T,C or G
acaagggcgcgctgaggtctcaatgttggatcagagttttccagaatctacatatatgctccttggaaggtaatttaaaatcatgtaaaatctcaaccaacagtgcagtgcaaggtgctgagggctccctgcgcaccccgtgaaaatggccaaggcattgaacgaaagggattaggtatttccatgccaaccagtggaggtcagtgttgagtcgtcaatctcttgccttaactggatgcattatgttgccacagtagaccggtctctgctcagaaaagggatactcaaaaatgaaaatgtggggctgatgacacttcgaagtatgaacaacagctccgtgctgctaaagaatggtcacctggaatagctgaaaacatctgaagcgacctcaggaagggttgctgcactgggagcaggtggatggaggggtgacggtgtagttatgcagcttcagctaccgagagctcactttgcctttcnaaccgactcccctccc

SEQ ID NO: 2530 - DNA, 559 bp, Homo sapiens
acaattccttgcttctttatgcaacctaacaaaataatatagaatgaagtcattagaaaaatatgaacctttctgaatctatattacatttttaatttaaattggaaaatacagtttagatcatatgaaacatatggatttcagacatgtattatctgtttctaacagattattacaggcggtctttattttggctgaaatgcaaaaatatgactttcttaataacagattagttaaaaatactttccattgatagcagtgctagtccctagaacaaaaggtaagcaaaatttatttgtaagttactgcctattcaatgcccagaatatgtagatcctaaatctaagcccttaatatacatctactttaaagataactgaaagatctcacatgcctgataatccttaatttaaaccgtcctgtaaacatagtcaaaatctgctaatagaaatacaattcaagtaaacattgcatatttgatttaaaccaccttacagttaaattcactcatgacacattggatcataaccactaatatgtaaaaagttttaaaaaaatc

SEQ ID NO: 2531 - DNA, 265 bp, Homo sapiens
actacccaggcgggtatggaggggctcccggagggcctgcgtttcccggacaaactcaggatccgctgtatggttactttgctgctgtagctggacaggatgggcagatagatgctgatgaattgcagagatgtctgacacagtctggcattgctggaggatacaaaccttttaacctggagacttgccggcttatggtttcaatgctggatagagatatgtctggcacaatgggtttcaatgaatttaaagaactctgggctgt

SEQ ID NO: 2532 - DNA, 450 bp, Homo sapiens
ataaataggagaggatgagagcccagaggtaacagaacagcttcaggttatcgaaataacaatgttaaggaaactcttatctcagtcatgcataaatatgcagtgatatggcagaagacaccagagcagatgcagagagccattttgtgaatggattggattatttaataacattaccttactgtggaggaaggattgtaaaaaaaaatgcctttgagacagtttcttagctttttaattgttgtttctttctagtggtctttgtaagagtgtagaagcattccttctttgataatgttaaatttgtaagtttcaggtgacatgtgaaaccttttttaagatttttctcaaagttttgaaaagctattagccaggatcatggtgtaataagacataacgtttttcctttaaaaaaatttaagtgcgtgtgtagagttaagaagctgttgt

SEQ ID NO: 2533 - DNA, 244 bp, Homo sapiens
  misc_feature 121: n = A,T,C or G
acagccaggcccgtgtgctgttaatagtgtgaaattgtcatgttaaaaaaaaaacaaaacaggaaccaaatgtgaccttgtgcatatattggtagctgaaaatcttcaaggctactgatgngtggccccttaatcttgtctttgattgctgtgtgcagggaaaggtgtccccgtttgttcatgctgttttggggggtgggggggtatttgcaagaatactcattttgacataataggtcctctt

SEQ ID NO: 2534 - DNA, 470 bp, Homo sapiens
actgttggttaaatgacaatttatgtggattttgcatgtaatacacagtgagacacagtaattttatctaaattacagtgcagtttagttaatctattaatactgactcagtgtctgcctttaaatataaatgatatgttgaaaacttaaggaagcaaatgctacatatatgcaatataaaatagtaatgtgatgctgatgctgttaaccaaagggcagaataaataagcaaaatgccaaaaggggtcttaattgaaatgaaaatttaattttgtttttaaaatattgtttatctttatttattttgtggtaatatagtaagtttttttagaagacaattttcataacttgataaattatagttttgtttgttagaaaagttgctcttaaaagatgtaaatagatgacaaacgatgtaaataattttgtaagaggcttcaaaatgtttatacgtggaaacacacctacat

SEQ ID NO: 2535 - DNA, 502 bp, Homo sapiens
actggctcctctgtggtgtctgcctgttgcgtgacactctccttgcagttcttgagttgcggcagaacatcgcgatgggaaccgatggtgggtggggctgcagagtgccccatcggtcaccttgtttctcaactacctcgcatcattgcagatgctagcgcgttgcctgtcgctttcccttggatacctagaccgttataaagtgtgccacatggacttaccgagcatggagagaggattttagctaggatttgaacacttggtgctgggaacctcagggtattgcttgccactaagccatgaaaccagagacaaaatctctatactgccctgagttggggggaattctcagtgccaactgtggctggtcctcattcaaagggacggtcagtttggtgtcaacatgaaacaccaagatgtctgtctctgaagcgtgatttttaaaatccccatgcctgtggctgcgcttcctatttctagggctgggaaacactccttgcat

SEQ ID NO: 2536 - DNA, 518 bp, Homo sapiens
  misc_feature 483: n = A,T,C or G
acttaaaagaaagatttcccattgcatacaggttattggagaaattttccttttgttgcatttgtggaagttagttttctggcccgtggcctttaattttcttaatcaacctaattacatcaggatagaggtagagtttctgtaaaagaagagacattaagagttcctgaaatttatatctggcataccgataggcttatattcaaaacatcttagtcatacgaccataaattaaaagtggagccactaaatagtttgcagtgggggatgggggctgggagatgttgggaagctattgttaccactctggtgaagagtcatgggacctcaaaagctgggatagtcacggtgggaatggaaaggaagggcacaagctgagaggcatttgggaggagaatcaatagcactttattgactggatgtgtgagatgagtgaggacagcaatcagaagaggactttgaggtttctagcctgagtggctngaaggacaccacttcccctacctgaaataggtagc

SEQ ID NO: 2537 - DNA, 327 bp, Homo sapiens
acagataaaagccagacttggcatggacccctctttctaggctgaaccttgagtccccctgctttttggtagacctcatggatcactgtcctgcagccagttcttcatgtggggcctcttaggccagtgctgagggaggcatgcttctctttctattccgcagaacaaaccctagtctggcaaagcctttcttgagctttaaagtgagattaatttaattccaatttggttgaagacttcctaagagagaaaaattcagtctactgaattggcataggtaaatggatgttaaacttttttaaagtaacgtaaagtaagatggtaggt

SEQ ID NO: 2538 - DNA, 346 bp, Homo sapiens
acagtgatagctccccctgggcaatacaatacaagaacagtgggttttgtcaaattggaacaaggaaacagaaccacagaaataaatacattggttaacatcagattagttcaggttacttttttgtaaaagttaaagtagaggggacttctgtattatgctaactcaagtagactggaatctcctgtgttcttttttttttaaattggttttaattttttttaattggatctatcttcttccttaacatttcagttggagtatgtagcatttagcaccactggctcaatgcgctcacctaggtgagagtgtgaccaaatcttaaagcattagtgctattatcagt

SEQ ID NO: 2539 - DNA, 358 bp, Homo sapiens
ctgagcaaggtccctctgcagcagaacttccaggacaaccaattccaggggaagtggtatgtggtaggcctggcagggaatgcaattctcagagaagacaaagacccgcaaaagatgtatgccaccatctatgagctgaaagaagacaagagctacaatgtcacttccgtcctgtttaggaaaaagaagtgtgactactggatcaggacttttgttccaggttgccagcccggcgagttcacgctgggcaacattaagagttaccctggattaacgagttacctcgtccgagtggtgagcaccaactacaaccagcatgctatggtgttcttcaagaaagtttctcaaaacagggagt

SEQ ID NO: 2540 - DNA, 496 bp, Homo sapiens
cctaattaggtcattcaggacagctaagtcagtatatttagagcaatactagcatacgtttttcttaattgttatcagcattgaccaagtggtttggaaggaggcatgctttaatatcacaataattttgatttgtaaaccaagaaattaatcctgtgtttatctaacttcataatagcaattattgcccgaagctatagtggcatatttacaaaagttcttattactgggcggactgataacatttaaaaaataattgtgtttgaccccaaatgactttatacccaattctacataaaaatatagaagatctatctttttttgttaccttcagatgttcactaaataactcagtttttaagcagaagttttcagggcattaaatatatgttgtgtatgaagtatctcaaactggaacataaatttagtgatcaaactgccattcacagtgtaaggcagcacttaaatttcgaacctaaagtttagatgcattgta

SEQ ID NO: 2541 - DNA, 587 bp, Homo sapiens
  misc_feature 554, 556: n = A,T,C or G
acccaacaataccaccgaccaggagctgcaacacattcgcaacagcctcccagacacagtgcagattaggcgggtggaggagcggctctcagccttgggcaatgtcaccacctgcaatgactacgtggccttggtccacccagacttggacagggagacagaagaaattctggcagatgtgctcaaggtggaagtcttcagacagacagtggccgaccaggtgctagtaggaagctactgtgtcttcagcaatcagggagggctggtgcatcccaagacttcaattgaagaccaggatgagctgtcctctcttcttcaagtcccccttgtggcggggactgtgaaccgaggcagtgaggtgattgctgctgggatggtggtgaatgactggtgtgccttctgtggcctggacacaaccagcacagagctgtcagtggtggagagtgtcttcaagctgaatgaagcccagcctagcaccattgccaccagcatgcgggattccctcattgacagcctcacctgagtcaccttccaagttgttccatgggctcctngnctctggactgtggccaaccttctccacattc

SEQ ID NO: 2542 - DNA, 473 bp, Homo sapiens
acaaagcagcaactgcaatactcaaggttaaaacattagaaaagcatttgtgtgacaggtatattacagtattatcaaaatattacattttcagacttacttagcagataatcatccaccagagcttaaatctttaaattatttccatagtcttaaaaaatatgtaatgtcagaatgcatataaaaagaatgtaaaaggaaacctaaaatacaaatggaataatgtaacaaataaatatttgatttcagtaactgttaataatcagctcaacaccaccattctctctaaactcaatttaattcttataggaataatgaactgtcaaatgccatggcataattatttatttccaagctatcatcaatgattagaactaaaaaaaatttggcataaaaaaatcacaattcagcataaataaagctatttttagcttcaacactagctagcatctctaagaattgttgaaataagt

SEQ ID NO: 2543 - DNA, 473 bp, Homo sapiens
acttatttcaacaattcttagagatgctagctagtgttgaagctaaaaatagctttatttatgctgaattgtgatttttttatgccaaattttttttagttctaatcattgatgatagcttggaaataaataattatgccatggcatttgacagtccattattcctataagaattaaattgagtttagagagaatggtggtgttgagctgattattaacagttactgaaatcaaatatttatttgttacattattccatttgtattttaggtttccttttacattctttttatatgcattctgacattacatattttttaagactatggaaataatttaaagatttaagctctggtggatgattatctgctaagtaagtctgaaaatgtaatattttgataatactgtaatatacctgtcacacaaatgcttttctaatgttttaaccttgagtattgcagttgctgctttgt

SEQ ID NO: 2544 - DNA, 502 bp, Homo sapiens
  misc_feature 231: n = A,T,C or G
caaaggaccctgctcagagccatgatgctgaggcaggaaggagttaagcttttggctccgctggtcactctctgagtttatcctccaaaccatgtgtgcccctcatacctgccagctgcactgtggtcccctggccctgctaccaggtagaggctggaccggtcccccttgctgctcagcagagaatggaggttctgaaaagaggcagctttccgacgctggtgagagggngacacctgatgagaaagggacaatattgcgggtgagaaaagctacctgggaggtgctgacagaggacttggccccaccatgaacctgagggccctgtaagaaagtgacagcacaagcttttatcattgcttccaagaattcaacaggaaccaccatgacttactcaaggacatcatgggtctacataggccatctgaggagtcaagggagtttttgttttgctttttagctgaaataacaactttagtgctatactaatttcctcattgat

SEQ ID NO: 2545 - DNA, 488 bp, Homo sapiens
accctctcttccagcacccaggccagtattgagatcgattctctctatgaaggaatcgacttctatacctccattacccgtgcccgatttgaagaactgaatgctgacctgttccgtggcaccctggacccagtagagaaagcccttcgagatgccaaactagacaagtcacagattcatgatattgtcctggttggtggttctactcgtatccccaagattcagaagcttctccaagacttcttcaatggaaaagaactgaataagagcatcaaccctgatgaagctgttgcttatggtgcagctgtccaggcagccatcttgtctggagacaagtctgagaatgttcaagatttgctgctcttggatgtcactcctctttcccttggtattgaaactgctggtggagtcatgactgtcctcatcaagcgtaataccaccattcctaccaagcagacacagaccttcactacctattctgacaacca

SEQ ID NO: 2546 - DNA, 336 bp, Homo sapiens
  misc_feature 54, 171, 172, 255, 262, 303, 311, 322, 329: n = A,T,C or G
acttagaaagttttgttttgtttaagagaaaatggctttacatgaatttatgtntcctcatggcagatatgttacacttccctctaaacagaaagacaagcccaggtggggcccgggcatcctcgaggaatgaagcagccattcccaccacctctcagggactaacaggtnnatgtggacacagtcgtggttcaagtgtccacagctcctcctggaccatgcctggtgcctgagtgtgaagactcctggcctgcntggcagnggcagctatctgggagggctaaacagcctggaggctgagtntgcagagnaagggggaccngaaagancccaggt

SEQ ID NO: 2547 - DNA, 555 bp, Homo sapiens
acctcaccagggaccgtaggcacgaagtggccagactcctcaatctgagtgagagacaagtcaaaatctggtttcagaaccggcggatgaaaatgaagaaaatgaataaggagcagggcaaagagtaaagattaaagattacccccagtcctccctagctcttccccatctcactcttagttatgtgacgactgcaaagccagtgctgtctgggatgtattcaagtgaatggggaagggagtctctcttccaagtcctttatctgcacctagaacctccctcctttcctttgcccttacctgtctctctcttctctctaggtgtcaggagaaagttttgttgatttagaagatagaaatagttggttcctaagaatgtgatgggccacaaggaaagagagaccccagtcaagctcctagtatgccctgtaatttttctgggaagtcctagcccctcacttccagcttgcctgtttcttctctacacccacccaaaagtcacccagggacactccaactctacacagctcagcagacatccacacacagtaatggg

SEQ ID NO: 2548 - DNA, 339 bp, Homo sapiens
acgcccaggaatagttaggagaggacagttatcaaagtaaatctggaattttcctgcatctagagtagcgctcataactataacctttaaatctgatctctgtcttacaacttccttcagaacacccattagaatatctgtagccagtgtcctctcatgagcctcatcaagaattattacaccataacgctccaggaggggatcattcatagcttcacgaagtaacatcccatcagtcatatacttaagaatggtttttgcactactgcagtcttcaaatcgaatggagtaaccaacttcctggtaaaacaacacagattccacagtggtgtgtggagt

SEQ ID NO: 2549 - DNA, 379 bp, Homo sapiens
actaatggtctacatccgattcaaaaccacatagttcattgatcacagatgcatggtattagtcacgaaagtttcagaacacattgtgttgattttgaaaggtcatttgcatcttctatgatttcaactttatctccatttaacttgcttgtaaagtatgtatgatgtattgtatatttaaaatcagcagaacggcaatattactctataattttttagttttgatagttgcactttttttttttaacacaaaagaaccacatcaacagtgatgaaatttaagaaagaaaaactgtggttgtgccttatttctttcataatcataaaaatcaaagccttaaagaaagcttcattgtgaaacagtaatgcaaaatcaaat

SEQ ID NO: 2550 - DNA, 475 bp, Homo sapiens
  misc_feature 438: n = A,T,C or G
gttggtttccttaaatatttttaattccttttctccttttcaatacaggttaaaggtgaatccttgtttcattctaagaaaatggacctgacagtaaatggggaacaactggatctggatcctggtcaaactttaatttattatgttgatgaaaaagcacctgaattctcaatgcagggtctaaaagctggtgttattgctgttattgtggttgtggtgatagcagttgttgctggaattgttgtgctggttatttccagaaagaagagaatggcaaagtatgagaaggctgagataaaggagatgggtgagatgcatagggaactcaatgcataactatataatttgaagattatagaagaagggaaatagcaaatggacacaaattacaaatgtgtgtgcgtgggacgaagacatctttgaaggtcatgagtttgntagtttaacatcatatatttgtaatagtgaaacctgt

SEQ ID NO: 2551 - DNA, 417 bp, Homo sapiens
  misc_feature 81, 82, 378, 379: n = A,T,C or G
actattttctaacaagaagccttcaggggaaataatggatcctagttatgtcaaagaaaacaatgagacaaaatggcaacnncacagtcttcaagtaaatagaatccctgatataaatggaaattaacatgtaattttgggggcaataaaaacaacaacaaaaacctgtgacaactctgtcctactcctttaaaaatgagctttgactctgtagtctcttaaggcacaaaacctgatagacggcatttaactggtggcctgcacctctgatttggattttaaaaaacaactattgacatttaaataaaaataaaccattttgttagagctggagatccttggataagttgggagaatattcaaatgaactagcatctnntatgtataaatatttgttgccaaagtaaaaaaagtacc

SEQ ID NO: 2552 - DNA, 461 bp, Homo sapiens
acaaaatattgaaatgaccaacgttacatgatttcaagggttgtcctttctgtgcttttatctgtcacgacaggaaggtgtggaaagtttatatccttaatttgactactcttggatattaaaatctttctattaattaaaaagacttttagacaacctcttaaatggaattacactatggaaaacagggctcccccaaaaacacctaggcagaactgagagttctttgaaaaccattcccaataaaaactaaatgaaaaataaatataaaacaaagcttaaaaaaatatgcattacctgacaccaaccttttctggctgacaatatttattcatgaaaacatatcagctgtctaccttttatatgcaaaccaagtcctgaggttaactaggggctgaagcaaactagcatttaggatgcaaacattcttggatttgtgatgtaaacttgccttgcacagg

SEQ ID NO: 2553 - DNA, 369 bp, Homo sapiens
  misc_feature 228: n = A,T,C or G
acttctggaaaaaaatgcaaatggtttagccaggatctttcctgtctgattcgtcactattattatatctgatgatgcgaatggttggagcgattcaatcctaagtcattaatgagctattttataaacaccactgtctgaagatcttcatttacattttgctaaggatcacttcgctaacctcacaggcttgtgtcaacagcatgatttgcaggacttcagttacantcttataaacaacacggctgtattgttaatcggttaatattttataaagtgtaaatattttattatgttttgaagggaactattgattctaaattattaaacccctgagaaggactatttaaatgaaatatacaattaagt

SEQ ID NO: 2554 - DNA, 512 bp, Homo sapiens
gtttttagcggctctctgggtagcagggtggtgtgatagcggcagcgaggggctcggagaggtgctcggattctcgtagctgtgccgggacttaaccaccaccatgtcgagcaaaagaacaaagaccaagaccaagaagcgccctcagcgtgcaacatccaatgtgtttgctatgtttgaccagtcacagattcaggagttcaaagaggccttcaacatgattgatcagaacaaagatggtttcatcgacaaggaagatttgcatgatatgcttgcttcattggggaagaatccaactgatgagtatctagatgccatgatgaatgaggctccaggccccatcaatttcaccatgttcctcaccatgtttggtgagaagttaaatggcacagatcctgaagatgtcatcagaaatgcctttgcttgctttgatgaagaagcaactggcaccatacaggaagattacttgagagagctgctgacaaccatgggggatcggtttacagatgagg

SEQ ID NO: 2555 - DNA, 541 bp, Homo sapiens
  misc_feature 526: n = A,T,C or G
acctgaaaaccaagattttgaaaaaattttcaagacagagaattttgataaatcctgacattgacctaattgacataggtaaatatgtttgtatatgtgctaataattttctaatttcggaacacgatgatgttatgactattgatttaaaaatttcaaataataatttttgaaattatagatgaatgctttcatttgagtttcattctgtaattcagcagttctgggtgaaatacagatagcaaaacaaatcatgatgctgttacaaatgtattagttatccaataagtgttttaagtcaatttttttaaaatgatatgagtcttacaggtttcttccatctttaaaatgctcaaacatggattcagggactaaaaggatgaactgattagacattttctattaggagtttggtaaaatattgtaaaaatatcttcacctgtgttaggagtattatcagaaagaatggattctttaataaatatgtaaaacacagtagttttggaattgccttccttagtattgnggttttcacctagct

SEQ ID NO: 2556 - DNA, 288 bp, Homo sapiens
actattttaatttgtattgaagaagttcagaaatttaaaagcagagcattttttatgatatcattgttggtgttaattgaaagtataatttgctggaacacaaagaccaaaatgaaagttttttcctccctgcttaaaaatgtagcagcttcttagttactttggaacactactcttacatgtataaagtgattgacttgactttctagcttcccttgtccggaggatattaaaatgcttgggtgaggtttagccatcttacttggctttttactattaacatgatgt

SEQ ID NO: 2557 - DNA, 521 bp, Homo sapiens
acaaggttcgctacactaacagctccaccgagattcctgaattcccaattgcacctgaaattgcactggaactgctgatggctgcgaacttcttagattgttaaataaaataaattataataaactgttaactcttttcagtatttaatacctgtagttcagttagtaactttttcatatatagcatgttgcctgtatgcagttgaactatataaagttcattgcaaagcagattatcttgtttttttgcatagcaatcaaagttgaaatttgtttgctacatcaacaaattaaggacattttcacaaactgagaaataaacaaatatgccaattcgtaggtggttttgccttatcctttgaatgtgacttaaaatcagcaatgatgatatagtaaatactgaaatttaggtgtaaatcaatacgttctacagggaaataatgaggctaagtatttttatgtttttagtggttttttagaaacctaatcttatagccgccattagcattactagagttatg

SEQ ID NO: 2558 - DNA, 329 bp, Homo sapiens
  misc_feature 171: n = A,T,C or G
acggccagggctattggttgaatgagtaggctgatggtttcgataataactagtatggggataaggggtgtaggtgtgccttgtggtaagaagtgggctagggcatttttaatcttagagcgaaagcctataatcactgcgcccgctcataaggggatggtcatggctagntttatagatagttgggtggttggtgtaaatgagtgaggcaggagtccgaggaggttagttgtggcaataaaaatgattaaggatactagtataagagatcaggttcgtcctttagtgttgtgtatggttatcatttgttttgaggttagtttgattag

SEQ ID NO: 2559 - DNA, 390 bp, Homo sapiens
acattagataatactaatgaaacacaggtagagttctagcatatgtagatcaatgatcagtcaaatcatcttctccaagaacgagattcattgtcctcttcttcttcatcatcatcttgaagtaatgagtcatccaccaaagactcttcctgaaactttaggttaaaatgtatttaggaatttacccaaaaaaaaaaaagaaaagaaaaaaaaggtgacacttttaaatactcatctctctcaacagagttgaatacaaaaggtatttttatagctagaacattcacaaaacaaagaaaagcaacatttaaccactcaatggtttctctatatgatctattctattgcttgcatgaaacacactaaacaaatatcaaataaagcctttgt

SEQ ID NO: 2560 - DNA, 190 bp, Homo sapiens
acaattccttgtgtcttctggtaagtctctgcactatcagagagcttttagttataatcattttcctgcaacaacagccaaactcaactattgagtttcagtgtgacacaccctctttgtagcttgctgggttaacccttggcttcaagtcctgatgatgtaatgagggtggggtgtattggcaatcagt

SEQ ID NO: 2561 - DNA, 406 bp, Homo sapiens
  misc_feature 346, 347: n = A,T,C or G
acagcaattgtagtaactgacacatcctctctttgcaagctgctgactgggcacactcatgccaagtttcagaattattggtcttctgggtttttgctttttaaaagaggtgtgggagcagaggaatggaaacaatcgtgagtttttgagctagggaaagttggagctcctttaatctttttaaaggatcagtgctgccctaagtgaataaactcaattgtccatctttattttagagttttaatgaattcaaggaagggagcatagcatatctgtggcaaactattttccactcaaatcctgagttattgctgcatgctttaatttcttccctttcagcatctgnnaaccttaaagccaatgtctgcgatctttttttggatatttatacttttagatatatagt

SEQ ID NO: 2562 - DNA, 429 bp, Homo sapiens; identical to SEQ ID NO: 1978

SEQ ID NO: 2563 - DNA, 305 bp, Homo sapiens
actgacaaagtcctgaaactacaatgagaggaaacacattgctctacttcgggataagtcatgaccgagactcaatttcagagacgctctatgaacagaggtgcttgaagccacagtggcagaagggaaagatggggaagtgtgccgaagagcctccaggcatgacagacagtcccctgaccaagcacaagtaacaggccctttgggtctctgcttctcactggaaaatgatgaagcctagatctgatgactcctagtgccaacatttaacaaagttcgaaagttatgcaggacttcacacatgt

SEQ ID NO: 2564 - DNA, 350 bp, Homo sapiens
  misc_feature 226: n = A,T,C or G
actgagcatggactgcagggttgctaggatacttggagtctctgaagagatgaggaggaacatgggggtgagctcaggcctggaactcattaccttgcctcacggacaccagctgcgcctggacataattgaaagacacaacacaatggccatcggcattgcagtggacattctgggatgcacgggcactttggaggaccgagcggccactctgagtaagatcatncaggtggcggtggaactgaaggattccatgggggacctctattccttctcagctctcatgaaagccctggaaatgccacagatcacaaggttagaaaagacgtggactgctctgcggcactagt

SEQ ID NO: 2565 - DNA, 267 bp, Homo sapiens
accaataagcagaccttgatttttggatgggctaattatgaatgtggaatactgaccagttaatttccagttttaatgaaaacagatcaaagaagaaattttatgagtaggttaaaggtctggctttgaggtctattaaacactagaaaggactggctgggtgagataaaatcttccttgttgattttcactctcattctataaatactcatctttctgagtagccatgatcacatacaaatgtaaattgccaaatcattttatagt

SEQ ID NO: 2566 - DNA, 459 bp, Homo sapiens
gggaacatgctgagaaactgatgaagctgcagaaccaacgaggtggccgaatcttccttcaggatatcaagaaaccagactgtgatgactgggagagcgggctgaatgcaatggagtgtgcattacatttggaaaaaaatgtgaatcagtcactactggaactgcacaaactggccactgacaaaaatgacccccatttgtgtgacttcattgagacacattacctgaatgagcaggtgaaagccatcaaagaattgggtgaccacgtgaccaacttgcgcaagatgggagcgcccgaatctggcttggcggaatatctctttgacaagcacaccctgggagacagtgataatgaaagctaagcctcgggctaatttccccatagccgtggggtgacttccctggtcaccaaggcagtgcatgcatgttggggtttcctttaccttttctataagttgt

SEQ ID NO: 2567 - DNA, 428 bp, Homo sapiens
  misc_feature 24, 39: n = A,T,C or G
ctttatttatctgtatgaacacanatttgacattacagntaaggaaataatttgagttgattcagaaatcctggcatgtgacaattttgttaaattaccaagtttggtttttaataatttctcaatattatgcgccaagatctaattttaaaactgtatgaggactttgtgctgaaaatagagtatttttttaaagtaaggctgtcttggtttaaaagcagattacagaaatgtaagtcaacttaagaacagtgaatgaatgtaaaaacattcagtcgagaccatatgcattttctgtgctgtttgtacttgaggtatgtaacatttgtatacctgaacttattttaaagatgaactgaaatgcacatagccaagtcttgagatacaagattgaatgtgtatttcttaaaaatacaactttgtgttgt

SEQ ID NO: 2568 - DNA, 472 bp, Homo sapiens
acttatattttgttttgctattaacctacttacggggttagggatttgcgggggggcttgtgtgttttgttggcttgtttgccatgaaggtagatgtgggtggggagaagacacaaggcagtttgttctggctagatgagagggaacccaggaattgtgaggttagcaggaatatctttagggtgagtgagttttccttgagttgggcacccgttgtgagagtttcagaacctttggccagcaggagagaggtggtagggagcagccagccggcaaaggaaggaggtggaaaaaaaccgccaccgggctgacttccacctcccagtggtgagcagtgggggcccaaacccagtttccttctcatttttgttagtttgccctttcggcctccctattttcttagggaaggggagtggggtccaagtgacagctggatgggagaagccatagtttctcccagtcagctaggatg

SEQ ID NO: 2569 - DNA, 575 bp, Homo sapiens
acaaggagtatctttggagtcagggtctttccccagctactcagcatacaggattcagaagaatgcgtttgtgaatcagcctacagcagacctacacccaaatggactccctccttcatacacgattatattattattcagacttctcccagaaactcccagtgacccttttgcaatttggcaaatcacagacagagactacaaaccacaagttggagtgattgcagatccttctagcaagacgttatcattctttaacaaggatacaagaggcgaggtgcaaactgttacatttgacgcagaagaagtaaagacattattttatggaagttttcacaaggttcatattgtagtgacctcaaaaagtgttaagatttacattgactgctatgaaattatagaaaaagacatcaaggaagctggaaatataacaactgatggttatgaaattcttggaaaactccttaaaggggaaaggaaatcagccgcattccaaatccagagttttgacattgtctgcagtccagtgtggaccagtagagacagatgctgtgatattccctctaggagagatg

SEQ ID NO: 2570 - DNA, 374 bp, Homo sapiens
  misc_feature 339: n = A,T,C or G
caaaatcttgacccagctgaacatgtcttcctgagtcagtgcctgaatctttattttttaaattgaatgttccttaaaggttaacatttctaaagcaatattaagaaagactttaaatgttattttggaagacttacgatgcatgtatacaaacgaatagcagataatgatgactagttcacacataaagtccttttaaggagaaaatctaaaatgaaaagtggataaacagaacatttataagtgatcagttaatgcctaagagtgaaagtagttctattgacattcctcaagatatttaatatcaactgcattatgtattatgtctgctttaatcanttaaaaacggcaaagaattatatagactatgaggt

SEQ ID NO: 2571 - DNA, 546 bp, Homo sapiens
ctaccgccagctcttccaccctgagcagctcatcacaggcaaggaagatgctgccaataactatgcccgagggcactacaccattggcaaggagatcattgaccttgtgttggaccgaattcgcaagctggctgaccagtgcaccggtcttcagggcttcttggttttccacagctttggtgggggaactggttctgggctcacctccctgctcatggaacgtctctcagttgattatggcaagaaatccaagctggagttctccatttacccggcaccccaggttccacagctgtagttgagccctacaactccatcctcaccacccacaccaccctggagcactctgattgtgccttcatggtagacaatgaggccatctatgacatctgtcgtagaaacctcgatatcgagcgcccaacctacactaaccttaaccgccttattagccagattgtgtcctccatcactgcttccctgagatttgatggagccctgaatgttgacctgacagaattccagaccaacctggtgccctacccccgc

SEQ ID NO: 2572 - DNA, 442 bp, Homo sapiens
actgaggaatgaatagaaaggcttccagatgtctaaaagattctttaaactactgaactgttacctaggttaacaaccctgttgagtatttgctgtttgtccagttcaggaatttttgttttgttttgtctatatgtgcggcttttcagaagaaatttaatcagtgtgacagaaaaaaaaatgttttatggtagcttttactttttatgaaaaaaaaattatttgccttttaaattcttttcccccatccccctccaaagtcttgatagcaagcgttattttgggggtagaaacggtgaaatctctagcctctttgtgtttttgttgttgttgttgttgttgttttatataatgcatgtattcactaaaataaaatttaaaaaactcctgtcttgctagacaaggttgctgttgtgcagtgtgcctgtcactactggtctgt

SEQ ID NO: 2573 - DNA, 425 bp, Homo sapiens
cggtgggaaataattgccgaagatgaaacaaaggaggcagaaaatcaaggcctggatatctcttctccaggaatgtctggtcacaggcagggccatgactcattagaacatgatgagcttcgggagatattcaatgacctcagcagcagcagtgaggatgaagatgagacccagcatcaagatgaagaagatataaacatcattgacacggaggaagatctggagagacagctacaggacaagctaaatgaatcagatgaacagcaccaggaaaatgaaggaaccaatcagctggttatgggaattcagaagcagattgacaacatgaaaggcaagctccaagagacccaggacagggcaaaacgacaagaggatctcatcatgaaagtggaaaatctggctctcaagaacagatttcaggctgt

SEQ ID NO: 2574 - DNA, 498 bp, Homo sapiens
actttcctagatgacatatcgagtcaacatgaagccttagctgaaatgaatgattcaggatattaatgagaaattctcacaaatgatatgcatttaggaaatgattttgctttccttaaatagttcgaaggcttgaaaataaactttttttttgcatttcttttagaatgtttggtcattaacaacttttaaccttatcttcctcttctccttagcccttaacagaccgagtccattctatttggaaataacaagaacttgatcagattattaaatcttggaaacctcatttttaccttataaagtgttaagtttcacgtgcatattctcttacaaatgtagtataaatgttatggatagatataaggaaatattggcatagtataggtaattagtgaaaagacacaacttcacaaaacataataaaagataaacatgaaactataacactacttaaaaaatattttctcccaaattattttagcatttttgactagt

SEQ ID NO: 2575 - DNA, 564 bp, Homo sapiens
  misc_feature 232, 557: n = A,T,C or G
acaatttcctttagagaagtttcagaaccaagactaatttacatgaaaagctgtagagaaagtagttgaaaagtccattcataaaacttttattccacttacatgaatttaatacacgtgttcttaacaattatgcttggattgttcatgaaaatttcataagacattaaacaaagctagccatcatctcaagttatttccctgttaactatttttacagcacatgcatgtnaggcaagtatcaaaaaaaaaaaaaaaaaatcacaaaagcaaaaatcctaaaaaaaagttaaatacatgggtttttgttttactgctgtgcttgatatacatgaagtaatgaataccaagcaattcatttttcctgcatctttacttttacatttgttcttaggttgcctaaaacatttaaatacaaataaaatgagtgtagcaaaaataatgaaagctaacagcaggtaactttacaaataatggaatgtgaaccgtttctgcccttatccagagtaaaatgggtcacaactttgtctaaaggaacacttctgcagctgtagtcnaaggtgt

SEQ ID NO: 2576 - DNA, 490 bp, Homo sapiens
accctcagagcaggaagcacacctgtgccatttctgggactctgattgatccagctgtggacattggaaggcgaaggaagggaggtggctcctgggtcatctttcacaaggctcaagacttcaacctgcagatgtatctttttccctccagtttttcctctagttcttttaggcatttaaattgtttctgttactctgtgcaaaataactttgagattggacaagaagatgttactaaagagaagttcctttaaaaggtcttgttcttgtgtcaaaaagctgcaagtttggtttgttctcgtgtgtgatcatgagtgcacaatgaagaagaccctagatgctgcattttttagctctgaagattccttaggtatccctgaagacagctcgctcagatgatcagcatttagagtgaaaacaagggcccttcatgggtgaacattagaaagagccagggttcaaagctggcgaatggatgacgcaccctagc

SEQ ID NO: 2577 - DNA, 549 bp, Homo sapiens
  misc_feature 490: n = A,T,C or G
agctaaacctaagggaattcaaccttgtctaaaagctgctgcccactcctcccctataacagaagatgtgatttgcaaactccttgttttatttgcaagtgcttctgacatcaccagagccagtcccatgccaggaactaaggatgtcatgtagatcgtggggacagagatgggtgatggaacttggaagatatttgagtttaccaacatactttaaaagtccttacatcccaaattgtgtttataattattttcttgacttttggctataagattttgtgtaatttttgaatttggtgttttctagaatttttaaaagccactttgatttagttttaaatatgtttaaaaatagcgattaaaattatgtaagcaaggagcctgttagtttatagatcatgccttcaaacctctagagttaatttgggtgacttttttaaaaataagaatgttaatgggtttgaagctttttattaaaccttgtaatttnagagacatttttaattgtgtttctcacctcatgctgaagggtgactcctttaacatgcc

SEQ ID NO: 2578 - DNA, 557 bp, Homo sapiens
ctcggatgccctaatcgacgaggacccccaggcggcgttagaggagctgactaaggctttggaacagaaaccagatgatgcacagtattattgtcaaagagcttattgtcacattcttcttgggaattactgtgttgctgttgctgatgcaaagaagtctctagaactcaatccaaataattccactgctatgctgagaaaaggaatatgtgaataccatgaaaaaaactatgctgctgccctagaaacttttacagaaggacaaaaattagatagtgcagatgctaatttcagtgtctggattaaaaggtgtcaagaagctcagaatggctcagaatctgaggtgtggactcatcagtcaaaaatcaagtatgactggtatcaaacagaatctcaagtagtcattacacttatgatcaagaatgttcagaagaatgatgtaaatgtggaattttcagaaaaagagttgtctgctttggttaaacttccttctggagaggattacaatttgaaactggaacttcttcatcctataataccagaacagagcacgttta

SEQ ID NO: 2579 - DNA, 481 bp, Homo sapiens
acattcaggatccctcggccaaggactggaccagaagaacacttgggaatcttgggtccacttatcaaaggtgaagttggtgatatcctgactgtggtattcaagaataatgccagccgcccctactctgtgcatgctcatggagtgctagaatctactactgtctggccactggctgctgagcctggtgaggtggtcacttatcagtggaacatcccagagaggtctggccctgggcccaatgactctgcttgtgtttcctggatctattattctgcagtggatcccatcaaggacatgtatagtggcctggtggggcccttggctatctgccaaaagggcatcctggagccccatggaggacggagtgacatggatcgggaatttgcattgttgttcttgatttttgatgaaaataagtcttggtatttggaggaaaatgtggcaacccatgggtcccaggatccaggcagtattaacc

SEQ ID NO: 2580 - DNA, 481 bp, Homo sapiens
  misc_feature 15, 473: n = A,T,C or G
agcgtggtcgcggcntgaggtactatatagttttaaaagaatgttgtcccaccaactattcatccaagcaaagaattgtaactataaataaagtctcagttacacttttgcctttatcacataatattcattgtagagcattgtgcaggtccaagaatagagctgctcaaaatctttgtggtagtttccttagtttttgtaacctgaggcatatgttccagagaacagggatatttgtctggtccagtgaccttggtgatcatagtcataattgaaagatgcctatggcatgcttaaatcagcattgtcaactgatttgttgttgtattattttcacttcttggatctatgtagtagttgtaataacaaatatttaaatagctatttttttgatgccattaaaaaaatcatactctggccttttttcccccttactgttgtttcccagatcttttaaaaattcatcccatatncagaaagt

SEQ ID NO: 2581 - DNA, 512 bp, Homo sapiens
taaaagctcaaaaattgtgattccttgaacgttcactaaatcttcaagcaaaaacacatttttacattatttttacgttgattattttagtgaaagaccatatgaagaagcatttttaatattaacttgttacatactttgatccactttacatcatttttatgttgttgaggtagggaaattagggttcagtttatcactggacattcaggaggcaagtcaatcttttttatttccttataaaattaactcttcaaaagctgttaaacagagagttatcttaatttttattgcagtaggaggaaatatatttaaaatatttgtagatttatagcaaatagagactcgttatttaaaggttaaataacaatttgttcttttgttgtttttgccagtttagggcagtagctgcttttgtcataaatatcttcctaccacatcaaaaatgctgcttttaaaatttttgtttataaattgagaaggaattttctctctataagtttctgtcattg

SEQ ID NO: 2582 - DNA, 356 bp, Homo sapiens
  misc_feature 33: n = A,T,C or G
acatgaaactccagcagatttaatattggcatncatcatctagtcaaacctctcacatgttcttcaaatcaatcaaatttgggattctcaacattttctgtgtcaataaaaggtgtggaattagtagattcgatgaagacctgtttttccttgccacattggacttccagacgccatttggattgggtttagaagatggggaaatttagaagacgtttcttggcctgagtctcttaagagtagagatgcagaagagagagtgagaccacgaagagactggctgttgactgcagggcaccaccagccgccttggtggtggcattagttggatttggggccaacccagagttggaagt

SEQ ID NO: 2583 - DNA, 458 bp, Homo sapiens
attgttttaaatctgttattttgctatttgcctgttagacatgactgatgacatatctgaaagacaagtatgttgagagttgctggtgtaaaatacgtttgaaatagttgatctacaaaggccatgggaaaaattcagagagttaggaaggaaaaaccaatagctttaaaacctgtgtgccattttaagagttacttaatgtttggtaacttttatgccttcactttacaaattcaagccttagataaaagaaccgagcaattttctgctaaaaagtccttgatttagcactatttacatacaggccatactttacaaagtatttgctgaatggggaccttttgagttgaatttattttattatttttattttgtttaatgtctggtgctttctatcacctcttctaatcttttaatgtatttgtttgcaattttggggtaagactttttttatgagt

SEQ ID NO: 2584 - DNA, 169 bp, Homo sapiens
  misc_feature 145: n = A,T,C or G
acaggcatgaggctttagtccaggctcagggaagtgtcagaatagggggtggggtgatggacgtggggctgtccagcagcccggtggcagcggcggtggcagcggcactgggaaacccagcaaagctaaagctatgctggaggcngggacggtcagcggagaggtcccg

SEQ ID NO: 2585 - DNA, 435 bp, Homo sapiens
  misc_feature 6, 110: n = A,T,C or G
gttcantctggattcatatttaatttgaaggtagaatgttttcaaatgttctccagtcattatgttaatatttctgaggagcctgcaacatgccagccactgtgatagangctggcggatccaagcaaatggccaatgagatcattgtgaaggcaggggaatgtatgtgcacatctgttttgtaactgtttagatgaatgtcagttgttatttattgaaatgatttcacagtgtgtggtcaacatttctcatgttgaaactttaagaactaaaatgttctaaatatcccctggacattttatgtctttcttgtaaggcatactgccttgtttaatggtagttttacagtgtttctggcttagaacaaaggggcttaattattgatgttttcatagagaatataaaaataaagcacttatagaaaaaaaaaaaaaa

SEQ ID NO: 2586 - DNA, 532 bp, Homo sapiens
acaaccaggatctaataatatttgtgactcagataatccagcaactgaaatgagcaaacagaacccggctgctaataagaccaattatagtcatcattcaaaaagccagagaaataaagatattccaaacatgttggacgttctaaaggatatgaataaggttaagcttcgtgcaattgagcggtcacctggcggtagacccattcataagaggaaaagacagaattcacattgggatccagtttctttaatatctcatgcacttaaacagaaatttgcatttcaagaagatgattcttttgagaaagagaatagatcttgggaatcttccccattttctagtccagaaacttcaaggtttggacatcacatttcacagtcagaaggacagcgaactaaagaagaaatggtcaacacaaaagctgttgaccaaggtatcagcaacacaagccttctaaactcaaggatttaaactcaacttaaggttgagctttaaacttccaaacttcttcctggatgataaattattctt

SEQ ID NO: 2587 - DNA, 526 bp, Homo sapiens
  misc_feature 230: n = A,T,C or G
acagtatttcaacaaaacaacttttctaaaaggtcgtaggcaaatgagtgattagtctcactcagaatatttaattggtttaaaatgagaaaatgaatctttttttctctgaagacataacttttaaaatcatctgacaactgacacttcactctgatgtccttgggatttgaaaatatcccagtgatggccgcatcttccctatcataaaaaaatctaaacactaaggntattcttacaactggaatataacaagcttcttccctgttaataagccatctcttctaaaaaaattttacacaaatttgatcaaacaagggggtcagtgcacacattttgaaagacagcttcagagcgtggagatgctgaagcggaggcgtgggggtttcagcagggaccacctgccatcagcgtgtcattgaacgcactggcgaagtgatgagcacagttacaaagggatcacatttcagaggagctgatgataaacagctggggtatctctgagttaactgaccatgtaaagcct

SEQ ID NO: 2588 - DNA, 497 bp, Homo sapiens
  misc_feature 484: n = A,T,C or G
acctgtgggtttattacctatgggtttatatcctcaaatacgacattctagtcaaagtcttggtaatataaccaatgttttcaaatgtattctgtcatacaaagagcagatttttattgaacttgtgcaataactatattaccatacaatataaatattcatgaatagtttcccaagtctggagcgaccacatagggagaaaatgtaaatgtctcaatttttgttcacaaaagtatattttatcaaattgctgtaagctgtggatagcttaaaagaaaaaaaagtttcctgaaatctgggaaacaagacatttaaagaatcagcaaaatttcaaataaaaaattatgaaaatattatcctcattagttcatttagtcccatgaaattaattattttctctgcttgatcttggtggacagtttcatgaagctgtcagttagttcattaaagttttggaaattctcagacagtgcagtggtatcanaaacttgtattca

SEQ ID NO: 2589 - DNA, 509 bp, Homo sapiens
acaaattccagtgtgcagaccacaacctcaaaacaaaaaagatctatttctactggatctgcagggagacaggtgccttttcctggttcaacaacctgttgacttccctggaacaggagatggaggaattaggcaaagtgggttttctaaactaccgtctcttcctcaccggatgggacagcaatattgttggtcatgcagcattaaactttgacaaggccactgacatcgtgacaggtctgaaacagaaaacctcctttgggagaccaatgtgggacaatgagttttctacaatagctacctcccaccccaagtctgtagtgggagttttcttatgtggccctcggactttggcaaagagcctgcgcaaatgctgtcaccgatattccagtctggatcctagaaaggttcaattctacttcaacaaagaaaatttttgagttataggaataaggacggtaatctgcattttgtctctttgtatcttcagtaatttacttggtctcgtc

SEQ ID NO: 2590 - DNA, 238 bp, Homo sapiens
actgagcatgtttaataaaaattaaatgagattaaagagaaggggcacagccacacgctccccgccccgcggtgattaggaaggtgatgcttgtgtaggtgaaagcatggagccagggcacagaagagctccgaacaccaacagtgctgcagtaagctgtctccacgtgggtggaatttctcacaatccactcacgggataggaattaattttctctccagttgcagaggggccttgt

SEQ ID NO: 2591 - DNA, 482 bp, Homo sapiens
acctactggcagttgggttcagggaaatgggattgacttggccttcaggctcctttggtcataattttaaaatatgggagtagaaaacaacaaagaatggaatggactcttaaaacaatgaaagagcatttatcgtttgtcccttgaatgtagaatttgtttttgatttcataattctgctggtaaatgtgacagttaaaatggtgcattatgtatatatattataatttagaaataccattttataattttactattccagggtgacataatgcatttaaatttgggatttgggtggagtattatgtttaactggagttgtcaagtatgagtccctcaggaaaaaaaaaaattctgttttaaaaagcaatctgattcttagctcttgaaactattgctacttaaatttccaataattaaaaatttaaaatttttaaattagaattgccaatacttctacatttgagaagggtttttttaga

SEQ ID NO: 2592 - DNA, 346 bp, Homo sapiens
acagcattctggaataaagcaaaagagtgttcattcacacacacagtagcttcaaaactgttcgatctgtttgttcccatgtagttttctaaagatggaaaaaaaggactttggtcatcaagactactgtggccatattagattactggaacatctaagcatcagtgtgtgaccatgcgaacaaaagacttcggggagtgtctatttttaaaaaggtttatgtgtgtcgaggcagttgtaaaagatttactgcagaatcaagcccacttttaggcttaggaccaggttctaactatctaaaaatattgactgataacaaaaagtgttccaaatgtggctattctga

SEQ ID NO: 2593 - DNA, 433 bp, Homo sapiens
  misc_feature 234, 352, 380: n = A,T,C or G
acctggagcgagtggacgagcagcatcgccgaaagtatgcccggcgtcccgtctaaaggtgttctgcagatccatggaaagcttcctgggaaacgtatgctagcagagcttctccccgtgaatcatatttttaagatcccactcttagctggtaaatgaatttgaatcgacatagtagccccataagcatcagccctgtagagtgaggagccatctctagcgggcccttcattnctctccatgctgcaatcactgtcctgggcttatggtgctatggactaggggtcctttgtgaaagagcaagatggagcaatggagagaagacctcttcctgaatcactggactccaganatgtgcatgcagatcagctgttgccttnaagatccagataaactttcctgtcatgtgttagaactttattattattaatat

SEQ ID NO: 2594 - DNA, 149 bp, Homo sapiens
  misc_feature 45, 68, 71, 79, 112, 123, 133, 139: n = A,T,C or G
acaagcttttttttttttttttttttttttttttttttctaccanatttattatttcaaaaaagtttnttnttcagcanacataattccaaaaccctttacagaagaatctnttcacttcctntgaaaaaaanaaatanttaaaaaaaa

SEQ ID NO: 2595 - DNA, 418 bp, Homo sapiens
acggccagggctattggttgaatgagtaggctgatggtttcgataataactagtatggggataaggggtgtaggtgtgccttgtggtaagaagtgggctagggcatttttaatcttagagcgaaagcctataatcactgcgcccgctcataaggggatggccatggctaggtttatagatagttgggtggttggtgtaaatgagtgaggcaggagtccgaggaggttagttgtggcaataaaaatgattaaggatactagtataagagatcaggttcgtcctttagtgttgtgtatggttatcatttgttttgaggttagtttgattagtcattgttgggtggtgattagtcggttgttgatgagataggacaaccagtaagctacccttttaccatcattggacaagtagcatccgt

SEQ ID NO: 2596 - DNA, 415 bp, Homo sapiens
  misc_feature 25, 131: n = A,T,C or G
actattttctaacaagaagccttcnggggaaataatggatcctagttatgtcaaagaaaacaatgagacaaaatggcaacttcacagtcttcaagtaaatagaatccctgatataaatggaaattaacatntaattttgggggcaataaaaacaacaacaaaaacctgtgacaactctgtcctactcctttaaaaatgagctttgactctgtagtctcttaaggcacaaaacctgatagacggcatttaactggtggcctgcacctctgatttggattttaaaaaacaactattgacatttaaataaaaataaaccattttgttagagctggagatccttggataagttgggagaaatattcaaatgaactagcatcttgtatgtataaatatttgttgccaaagtaaaaaaagt

SEQ ID NO: 2597 - DNA, 450 bp, Homo sapiens
accttacagtgatatatgacttctctagtcactccacattatccagtgatggcacctagataataatgcaccaaagaaaagtaaagaattgcagacttctagaagcaatgatgaaatataattctcagttgcagaaaatgatgatctgggtcattatgcaaatgcattcctgcctgtttttcttccaagttcttgcatggagcccaacacatccgatagcatggaagtggaagttaaactcccgatgaataatttttataaaattataaagaaaacaactaataacatgtatgaaattcacattaaatttagaagtggatagtaaagattaggactatatttcctttggggtgctgcttgtaggaaattactgaatgacaactgctatcacctgtgatttcatatccttttagctgatattgctaaagagcttcccaaactttttcaagt

SEQ ID NO: 2598 - DNA, 318 bp, Homo sapiens
accacatttctccagacatttactcttaatcactgcattaatatttggttgcatagtgactgagtcagaattttttaaaaaaattaaaaatcaacaaaatttgggatacttaaaacttactgaatagaatctatagttgtatctaaatttgttattactagttatgggccatacttgattcagagcatgacttattatagttcaaagattggtttctttatgccactgtagaccaaaggtatatcagcttattcagaataattaaagttatgtttctgaagagtcagaaggtgaagtttgttagtccatggcctaggt

SEQ ID NO: 2599 - DNA, 510 bp, Homo sapiens
  misc_feature 509: n = A,T,C or G
acacaatggtttattaaaggaatgtatggcccacatcaacctagcaaggattctactggtaaaccttcccatggccaaaggaaaaacaagcaggagttgagtggctggggtggggtgcaggcaatggagagagggcagaagggtgtagaagctgaagggggctagaagcttactcctgagtttcttccttctgtcttcaaatctttacttcttatggccaaagacccagctgtttcataggctggagatgcactcttctagactgctcgagacagccagagacaggggaggagggaagaaggatactgtggaaagggatggcggggcaaacatttagagctagaagccactactgggccaatgctaaagtttctgtctctaagcctaaaaaagccagtgtagtagggcccttatcactcttagtttgctaggtttcccctctgaaataatgagcagatttagccaggctagcagaaaggaagaggacggggctgtgcaggagttagcana

SEQ ID NO: 2600 - DNA, 361 bp, Homo sapiens
actattcaaacttcattttacttcttaaggaaaatctccacataatagaaaactcatggaaataatatactttgtggatgctaagaagttgaatcgatgtcatttttagcaatagtgttgccacgatttgtctttttttatataatgaaccactcttttttaactttgtaaccttcccttgaagacagaattttggtgttggtgcttgtaagcattttcattaataatatgagaaatgatacctggagagagagattatgagcaaatgtattgcttcttttagaggaggaagcatacaacctcttttgtgtgaattttgttattatggtcaaagaatgcattcctaagttttcatttgagt

SEQ ID NO: 2601 - DNA, 367 bp, Homo sapiens
  misc_feature 201, 219: n = A,T,C or G
cttaggttattcccacacttgactttatcattgtttactactagtaaaaagcagcattgccaaataatccctaattttccactaaaaagcttaacatcatttcattatatttttagtggaaaattagggattatttggcactaaaaatataatgaaatgatgttaagctttttgaaaagtttaggttaaacctactgttgntagattaatgtatttgtngcttccttttatctggaatgtggcattagcttttttattttaaccctctttaattcttattcaattccatgacttaaggttggagagctaaacactgggatttttggataacagactgacagttttgcataattataatcggcattgt

SEQ ID NO: 2602 - DNA, 290 bp, Homo sapiens
  misc_feature 239: n = A,T,C or G
acatacctggctggattgagaatgatgaaatacaatggaatccaccaagacctgaaattaataaggatgatgttcaacacaagcaagtgtgtttcagcagaacatcctcgggaggctcatttgtggcttctgatgtcccaaatgctcccatacctgatctcttcccacctggccaaatcaccgacctgaaggcggaaattcacgggggcagtctcattaatctgacttggacagctccnggggatgattatgaccatggaacagctcacaagtatatcattcgaataagt

SEQ ID NO: 2603 - DNA, 515 bp, Homo sapiens
  misc_feature 440: n = A,T,C or G
acactcccacgaccacggcatggtctctttcatatggctcaagggccaactactcctgcggcttcatgttctcctgttgcatctttttcacttcggaggcaaacacggcctcggctgaggctgtggagtcaatgcagttggccttaatggaaatcacaaagtgtcctccattacgcaggaaggtgtgggcattcagggccacaatccgggtctggtctggctgggccacatcagcaaagatcacatccaccattgcgatgagcatgcggtatttgtgtgggtgtcgagcatcctcgatcacaggaatgatgttggtcctcttcttggccaagttaatgaggtcacggccagagcggtgggagaactcgactgcatagactagaccatccggaccaacgatgtcagagacatgggagaccgtggtgcccgaggcagccccngaggtagagaaccttagcccccggtttgatgtggatctggtccacaccacccaggattgctgctgctagcttgga

SEQ ID NO: 2604 - DNA, 264 bp, Homo sapiens
gaaactagagggcaggtcttcataaaagccctttgaacccccttcctgccctgtgttaggagatagggatattggcccctcactgcagctgccagcacttggtcagtcactctcagccatagcactttgttcactgtcctgtgtcagagcactgagctccacccttttctgagagttattacagccagaaagtgtgggctgaagatggttggtttcatgtttttgtattatgtatctttttgtatggtaaagactatattttgg

SEQ ID NO: 2605 - DNA, 196 bp, Homo sapiens
aggccctgcttccactcccctcagaggcttttggtcatcctctgcgtgtcagtaaaagcaggcagcccataaaaaaaaaaaaaaaaaaaaaaaaaaaaaaaaaaaaaaaaaaaaaaaaaaaaaaaaaaaaaaaaaaaaaaaaaaaaaaaaaaaaaaaaaaaaaaaaaaaaaaaaaaaaaaaaaaaaaaaaaaaaaa

SEQ ID NO: 2606 - DNA, 164 bp, Homo sapiens
ggaacaactggatctggatcctggtcaaactttaatttattatgttgatgaaaaagcacctgaattctcaatgcagggtctaaaagctggtgttattgctgttattgtggttgtggtgatagcagttgttgctggaattgttgtgctggttatttccagaaaga

SEQ ID NO: 2607 - DNA, 213 bp, Homo sapiens
accgtgcaccccgctcttacccgaagtccaactcttccaaggagtatgtgtgacctgggatctccttgccccagcctgacaggctatgggagtgtctagatgcctgaaagggcctggggctgagctcagcctgtgggcagggtgccggacaaaggcctcctggtcactctgtccctgcactccatgtatagtcctcttgggttgggggtgggg

SEQ ID NO: 2608 - DNA, 473 bp, Homo sapiens; identical to SEQ ID NO: 175

SEQ ID NO: 2609 - DNA, 522 bp, Homo sapiens
aaagaagccgaccaaaaccaagatggtgacgaaagtgacctctggtcgtcctcactgctcattaaaactttttaaaaaaaatatgaaaagaggctgggccctgtggctcacacctgtaatctcaggactttgggaggccaaggcaggtggatcgcctgaagtcaggagtttgagaccagcctggccaacgtggcacaaccaaaaatgcaaaaattagccagatgtggtggcacacacctgtaatcccagccacttgggaagctgaggcaagagaattgcttgaagccaggagacagaggttgcagtgagccgagatcatgccactgcactccagcgtgggcgacagagtgagactctgtctcaaaaaaataaaaaataaaataaaataaagctattatttgtgtgttaatagcacgaacaaaagacagagcatatttcttctttactgaagcactcttctatttcattccttgtcagttgtgtatatttctgaatggtttttttaaacaagtaaactatgat

SEQ ID NO: 2610 - DNA, 500 bp, Homo sapiens
acgcctccaccgcctcctgctctgacgtgtcagcctgctgcgaagtggagtccgaggtcatgatgagtgactatgagagcggggacgacggccacttcgaagaggtgacgatcccgcccctggattcccagcagcacacggaagtctgactctcaactccccccaaagtgcctgactttagtgaacctagaggtgatgtgagtaatccgcgctgttctttgcagcagtgcttccaagctttttttggtgagccgaatgggcatggctgcgctggatcctgcgcctctggacgtgctagccatttccagtgtcccaactactgtcatcgtgaggttttcatcggctgtgccatttcccaacgtcttttgggatttacatctgtctgtgttaaaataatcaaacgaaaaatcagtcctgtgttgtcagcatgattcatgtattttatatagatttgattattttaattttcctgtctcttttttttgtaaattttatgtacc

SEQ ID NO: 2611 - DNA, 189 bp, Homo sapiens
acactgatctgagatcgcaccactgcactccggcctgggcgacaaagtgagactgtctaaaaaataataataataaaaagcattttgaaattagtcgcggtcaatgcaattctactctttggaatccgtttagctaaatgaatgtagtgctcttgttgaatggaaacaggtgataggaaatgcctacca

SEQ ID NO: 2612 - DNA, 347 bp, Homo sapiens
  misc_feature 174: n = A,T,C or G
cacataccaaggccaccacacaccacctgtccaaaaaggccttcgatacgggataatcctatttattacctcagaagtttttttcttcgcaggatttttctgagccttttaccactccagcctagcccctaccccccaattaggagggcactggcccccaacaggcatcaccangctaaatcccctagaagtcccactcctaaacacatccgtattactcgcatcaggagtatcaatcacctgagctcaccatagtctaatagaaaacaaccgaaaccaaataattcaagcactgcttattacaattttactgggtctctattttaccctcctacaagcctcagagt

SEQ ID NO: 2613 - DNA, 499 bp, Homo sapiens
caagaccaagagccacaggatctctttgcagatgccacagtggagctatccttggacagcacacaaaataatcagaagaaggtgctagccaaaacactcatttctcttcctcctcaggaagccacaaattcttcgaagccccagccaacctatgaggagctagaggaagaagaacaggaggatcaatttgatttgacagtcggtataactgatcctgagaagataggggatggtatgaatgcatatgtagcctacaaagttacaacacagacaagcttaccattgttcagaagcaaacagtttgcagtaaaaagaagatttagtgactttctgggtctttatgagaagctttccgagaagcactctcagaatggcttcattgtccctccgcccccggagaagagcctcatagggatgacaaaagtgaaagttgggaaggaagattcttcttctgcagaatttcttgaaaaacggagggccgctttagaaaggtacctgc

SEQ ID NO: 2614 - DNA, 473 bp, Homo sapiens
acaaagcagcaactgcaatactcaaggttaaaacattagaaaagcatttgtgtgacaggtatattacagtattatcaaaatattacattttcagacttacttagcagataatcatccaccagagcttaaatctttaaattatttccatagtcttaaaaaatatgtaatgtcagaatgcatataaaaagaatgtaaaaggaaacctaaaatacaaatggaataatgtaacaaataaatatttgatttcagtaactgttaataatcagctcaacaccaccattctctctaaactcaatttaattcctataggaataatgaactgtcaaatgccatggcataattatttatttccaagctatcatcaatgattagaactaaaaaaaatttggcataaaaaaatcacaattcagcataaataaagctatttttagcttcaacactagctagcatctctaagaattgttgaaataagt

SEQ ID NO: 2615 - DNA, 534 bp, Homo sapiens
  misc_feature 522: n = A,T,C or G
acaaaattttattaaaggtctttagagagcaacatccagactccagaatacagctgccaaggagaccctgttatgctgtggggactggctggggcatggcaggcggctctggcttcccacccttctgttctgagatgggggtggtgggcagtatctcatctttgggttccacaatgctcacgtggtcaggcaggggcttcttagggccaatcttaccagttgggtcccagggcagcatgatcttcaccttgatgcccagcacaccctgtctgagcaacacgtggcgcacagcagtgtcaacgtagtagttaacagggtctccgctgtggatcatcaggccatccacaaacttcatggatttagccctctgtcctcggagtttcccagacaccacaacctcgcagcctttggccccactctccatgatgaaccgcagcacaccatagcaggccctccgcacagcaagccctcctaggagtttgtaacgcaaagactctgcctgggcaatggcacacagacctntagtggccacct

SEQ ID NO: 2616 - DNA, 326 bp, Homo sapiens
actaacctcattgtaatgaggtttaagagaaggcccagcactaagccaggctctcaggaaaattcaaacaacagttcctctttgcccttcaatatagccccttctcatctgtcatgggctgaagaaccactggacctgtaaaccaagcacacaggtataagtccacagaccaggtgaaggcctagatggcaaaacacatgggctttgtgactccactactgacttccaggctaaggaaggactgacttagtgagctgttccaagaccactgagctcatggttccctgtggctgggacctccatcatgaccggggcttgaagagggt

SEQ ID NO: 2617 - DNA, 315 bp, Homo sapiens
acatagtaagtccagactgggctattgccaaagaactaatctttagtctacttcaacatgttacatggtattcctgactctacagactatcagcatctgtggaggttagctcctaaaggtcccaaagaacaggaaacatgcaggaataaaggactcctcatgaagagcaggtgggagcgagtgggcaggtctgtatcttctcagcaaagtaaggattgagtatagagagctgtttgtcttaactgggcttccctgaagaatctgagccaaactggaagaaaccagcctcatttccagtgttgagatgttagctgt

SEQ ID NO: 2618 - DNA, 546 bp, Homo sapiens
acagcctgttctatatgaataggtgccaggtgctggcacttccaactaagctaccaaccctgaagtaagcaagaaaagaatataaatatttaagaaaataaatcaaagtgtatttcaaataaggctcttccaaacaaaaatctgtgttataaattaacagcaggttattgttatggcagagtcagagacctccagactctttaaaatagtagacgactcatttgtcaagagttagggtaagaaagcagatcaccagctgctcctgtgttcacaagtgctcccctagttttctttcagaaaactttgaaacaactaagcaggcggagctctggtttctgataggtgagtgccaggcttaatctgcaaactgaacaatgtttcctgggaagttgcaattaatttttcaaacccagggcttaagtgagggagactgagccaagatggtagtaggaggagttccttagaaaactgagtggcagtgcaggggctgttgcagctctgacagaattcacaaggaagctgctacagcaaacccatcaggttccc

SEQ ID NO: 2619 - DNA, 544 bp, Homo sapiens
  misc_feature 32, 33, 147, 243, 317, 491, 492, 498, 499, 500: n = A,T,C or G
gcatcctagccgccgactcacacaaggcagannttgccatggagaaaattccagtgtcagcattcttgctccttgtggccctctcctacactctggccagagataccacagtcaaaattggagccaaaaaggacacaaaggactctntgacccaaactgccccagaccctctccagaggttggggtgaccaactcatctggactcagacatatgaagaagctctatataaatccaagacaagntaacaaacccttgatgattattcatcacttggatgagtgcccacacagtcaagctttaaagaaagtgtttgctnaaaataaagaaatccagaaattggcagagcagtttgtcctcctcaatctggtttatgaaacaactgacaaacacctttctcctgatggccagtatgtccccaggattatgtttgttgacccatctctgacagttagagccgatatcactggaagatattcaaaccgtctctatnnttacgnnnctgcagatacagctctgttgcttgacaacatgaagaaagctctc

SEQ ID NO: 2620 - DNA, 402 bp, Homo sapiens
  misc_feature 174, 402: n = A,T,C or G
acagtccttcctgtttagtttatgccaggaaattaatcgggttggaggccatgccttgccaaaggtgacattacaggagatgctgaaaagctgtatggttcaagtagtagctgcctatgagaaactctccgaagaaaaacagattaagaaagaaggtgcatttccagtcaccangaaccgggcgctgcagctgctttatgatctgcgttacctcaacattgttctgacagccaagggtgacgaggtgaagagtggccggagcaagccagactccagaattgagaaagtgactgaccacctggaagccctcattgatccatttgacctggacgttttcacgccacacctcaacagcaaccttcatcgcctggtgcagcgaacttctgttctgtttggattggn

SEQ ID NO: 2621 - DNA, 514 bp, Homo sapiens
actaggttcttaggaaacaacagaattcctcaaatgcctaaaacaaagaaaatagaaacccagaaaacaaaacaaaataaaacaaaaccatcagaactgtgagtggaaactaaggtgatgatctgggagcaatacactaaaatcttgtgtcgagacctatatgaaggctggcagtggagctaaacctggacatgctgaagacaagggagctgaaccagggctcctacatgaagcagggataactgatggcagtaaatgtggtctcaaattgcagatggtctggaggaaaatttcccaaatttagagcctcaggattcccaaagatcctccaaatatgagctcacaatcaaagatcagagacgttgaaaaataaaaaacaccttaagtgggcagcataaaaaacagctaatttagaaccccaaaggcttcagatgtcagaatattagagacttatgataataagcaatatttgcagagtatttgtatgtgccagacactattgtaagtgcttcat

SEQ ID NO: 2622 - DNA, 636 bp, Homo sapiens
  misc_feature 607: n = A,T,C or G
actcttgtccacagcagagacattgagtataccattggcatcaatgtcaaaagtgacttcaatctgaggaacacctcggggtgcaggaggtatgcctgtgagttcaaacttgccaagcaggttgttatcctttgtcatggcacgctcgccttcataaacctgaataagcacaccaggctggttgtcagaataggtagtgaaggtctgtgtctgcttggtaggaatggtggtattacgcttgatgaggacagtcatgactccaccagcagtttcaataccaagggaaagaggagtgacatccaagagcagcaaatcttgaacattctcagacttgtctccagacaagatggctgcctggacagctgcaccataagcaacagcttcatcagggttgatgctcttattcagttcttttccattgaagaagtcttggagaagcttctgaatcttggggatacgagtagaaccaccaaccaggacaatatcatgaatctgtgacttgtctagtttggcatctcgaagggctttctctactgggtccagggtgccacggaacaggtcagcattcagttcttcaaatcgggcacgggtaatggaggtatagaangtcgattccttcatagagagaatcgatct

SEQ ID NO: 2623 - DNA, 558 bp, Homo sapiens
actttgtagagattgacttcctaagctacttaagacaacttgcaccactaagaaaaaaatgtagaaccatttggaaaaatgaaatttagtagttccaagtttcaaagaaatgtcaacattttattccattcaataaagaacaaaaccaatagtgtttttattactttcatctgaaacattccatgttttaatctgagccttgcagactttcatttggagtttgaacccgttttggttgcatttcatttttggagaacttaattaacgtgagattggcaattgaaatgcaggtgcagttttctgttaatgtcatgctgttgtttaggtaataagaaatattaagtaattggctttagattttgtaatttttttccctgagttcctgctagatttcgtattctagtagtcaatgtattttcagtgaaatgcaaaaatattcccattatctttgaccagtattaatttttgagatcttactgcttgtcacttgaatcccgtgattgtcatacatctctggtataagcaacatttgatttttgaagtgtgtagaccatctct

SEQ ID NO: 2624 - DNA, 230 bp, Homo sapiens
  misc_feature 121, 225, 228: n = A,T,C or G
gcatcgagaatccacgcccggggaccagtaggacttgagggactgcttactactaagtggctgctgcgagggaaggaccacgtggtctcagatttctcagagcatggaagtttaaaatatnttcatgagaacctccctattcctcagagaaacaccaactgaaaagagccaggaaaacccgggaattttccaaaaggtcttcacgttaaacttgtcttatctcanganag

SEQ ID NO: 2625 - DNA, 472 bp, Homo sapiens
  misc_feature 330: n = A,T,C or G
gccgtcgccgagcctgccgtctacttcaaggagcagtttctggacggagacgggtggacttcccgctggatcgaatccaaacacaagtcagattttggcaaattcgttctcagttccggcaagttctacggtgacgaggagaaagataaaggtttgcagacaagccaggatgcacgcttttatgctctgtcggccagtttcgagcctttcagcaacaaaggccagacgctggtggtgcagttcacggtgaaacatgagcagaacatcgactgtgggggcggctatgtgaagctgtttcctaatagtttggaccagacagacatgcacggngactcagaatacaacatcatgtttggtcccgacatctgtggccctggcaccaagaaggttcatgtcatcttcaactacaagggcaagaacgtgctgatcaacaaggacatccgttgcaaggatgatgagtttacacacctgt

SEQ ID NO: 2626 - DNA, 375 bp, Homo sapiens
  misc_feature 248, 255, 282, 285, 294, 345: n = A,T,C or G
actttcagatcaacaacaaaacgggagccatctctcttacccgagagggatctcaggaattgaatcctgctaagaatccttcctataatctggtgatctcagtgaaggacatgggaggccagagtgagaattccttcagtgataccacatctgtggatatcatagtgacagagaatatttggaaagcaccaaaacctgtggagatggtggaaaactcaactgatcctcaccccatcaaaatcactcangtgcggnggaatgatcccggtgcacaatattccntanttgacaaanagaagctgccaagattcccattttcaatcgaccaggaaggagatatttacntgactcagcccttggaccgagaagaaaagg

SEQ ID NO: 2627 - DNA, 511 bp, Homo sapiens
gtgttatataaggtcaacatgtttttagtgcttcagtttgacttgtctacatctaaagttaactctttaaggcttacatttatgattataattctttccatcgagggatttagtctccattattgtcatgtttcttgatttttttcattatacttggttcttctttttgtctaggttttatatataccttaattaattctttcttggctgttttatatctatgttgctgtcagcatgggaatctctattattagaaagctattaacttttaaaatatgtatcttttggtgattttctttgttctaacagttttagatggcctgtttgctctttctaaatataaaatcataggtatttctattttgtttttgtgtttcataaaattgtaataagtttttttgatattttttcattacatatgaagttaattgttggttttaaacaaatgttctttgttaggataacagaaataacatcttctattcttgtttgttggaagctaaaagcttga

SEQ ID NO: 2628 - DNA, 555 bp, Homo sapiens
  misc_feature 547: n = A,T,C or G
acttttatatatactatctatgaagaattcactaaagcatgaatcaccttataatgagaagctaaaaatgtatcaaaacgaacataagtataggtaatccacatcaaacatactacatcttccaagtctagagcatacactggtataaactgtattacaacccagattagtttgaaatcttgtttcaaaacattgctcagtattaagtctcagtagacaaataataggaccacatgagaaactgttcggcaggtggctgaggaaaccttaacttccaaaggctcaaagtggtcctccagagactgttacactcccttaggtatttatttcagggaagggcactattaagggacacttttgagtataaagacaggtgaactcacaaagtataggcagatacatgcttgattttatcttctaatctacagataatacattagaataaaaatgtaatgaattcatacacctttcaaaaggaaaaactgatgaagaagtaacaataaagttataaatgataatgatcagatgaaataatttaaatgaagcntgtctgtg

SEQ ID NO: 2629 - DNA, 384 bp, Homo sapiens
  misc_feature 167, 168, 239: n = A,T,C or G
actgggattatataggcatgagccactgagcctggcccagaagcgtttttctcaaaggccctcagtgagataaattagatttggcatctcctgtcctgggccagggatctctctacaagagcccctgcccctctgttggaggcacagttttagaataaggaggaggnngggagaagagaaaatgtaaaggagggagatctttcccaggccgcaccatttctgtcactcacatggacccnagataaaagaatggccaaaccctcacaacccctgatgtttgaagagttccaagttgaagggaaacaaagaagtgtttgatggtgccagagaggggctgctctccagaaagctaaaatttaatttcttttttcctctgagttctgt

SEQ ID NO: 2630 - DNA, 342 bp, Homo sapiens
  misc_feature 322, 333: n = A,T,C or G
gtacgacttgactactcgcatcgcgcactttttggatcggcatctagtctttccgcttcttgaatttctctctgtaaaggagatatataatgaaaaggaattattacaaggtaaattggaccttcttagtgataccaacatggtagactttgctatggatgtatacaaaaacctttattctgatgatattcctcatgctttgagagagaaaagaaccacagtggttgcacaactgaaacagcttcaggcagaaacagaaccaattgtgaagatgtttgaagatccagaaactacaaggcaaatgcagtcaaccagggatggnaggatgctctntgactacct

SEQ ID NO: 2631 - DNA, 387 bp, Homo sapiens
  misc_feature 131, 258, 280, 295, 325, 333, 338, 339, 352, 368: n = A,T,C or G
actgattgaagaaaaccacctctctgacaagtgctaatagcatctactacatttaatgtcatagattcttatttagcaagtgagctggattcgttgcaaacattcacaacttccattcagagaggctggcngatgtcagatggaagaaaaaccccggaggccagatctttactggtgctcacttctccatcagtctttctaaacactctaaataatagcttgtacattggttgggggccatggcgggttccacattcntatgattctaatagtcagggcnggggcatgctgctgngtcttgaatagggattttgcatctggctgnctctggangccgnnatcctgaccttangaaagacactcccttntgctccaagattggtgaag

SEQ ID NO: 2632 - DNA, 413 bp, Homo sapiens
acaggatgaatttaaatgtgtttttcctgagagacaaggaagacttgggtatttcccaaaacaggtaaaaatcttaaatgtgcaccaagagcaaaggatcaacttttagtcatgatgttctgtaaagacaacaaatccctttttttttctcaattgacttaactgcatgatttctgttttatctacctctaaagcaaatctgcagtgttccaaagactttggtatggattaagcgctgtccagtaacaaaatgaaatctcaaaacagagctcagctgcaaaaaagcatattttctgtgtttctggactgcactgttgtccttgccctcacatagacactcagacaccctcacaaacacagtagtctatagttaggattaaaataggatctgaacattcaaaagaaagctttgg

SEQ ID NO: 2633 - DNA, 270 bp, Homo sapiens
  misc_feature 124, 165: n = A,T,C or G
acttccaactctgggttggccccaaatccaactaatgccaccaccaaggcggctggtggtgccctgcagtcagcagccagtctcttcgtggtctcactctctcttctgcatctctactcttaanagactcaggccaagaaacgtcttctaaatttccccatcttntaaacccaatccaaatggcgtctggaagtccaatgtggcaaggaaaaacaggtcttcatcgaatctactaattccacaccttttattgacacagaaaatgccgag

SEQ ID NO: 2634 - DNA, 444 bp, Homo sapiens
acagtgagaaagaccgttttcagggacgttttgatgtaaaaattgaagttaagagctgatcacaagcacaaatctttcccactagccatttaataagttaaaaaaagatacaaaaacaaaaacctactagtcttgaacaaactgtcatacgtatgggacctacacttaatctatatgctttacactagctttctgcatttaataggttagaatgtaaattaaagtgtagcaatagcaacaaaatatttattctactgtaaatgacaaaagaaaaagaaaaattgagccttgggacgtgcccatttttactgtaaattatgattccgtaactgacttgtagtaagcagtgtttctggcccctaagtattgctgccttgtgtattttatttagtgtacagtacgaggatattgccaaccgcagccgggctgaggctgagagcatgt

SEQ ID NO: 2635 - DNA, 582 bp, Homo sapiens
  misc_feature 12, 13: n = A,T,C or G
aaattaaccctnnctaaagggaataagcttgcggccgcaaaccttttttttttttttttttgctttcaagtttattaaagaagatcactaaagatattgactagagaatgctgtgtgctatttcaattacatttgtttttcttttattaacaggaattttgattcttcaaggaagtggctcaatttcaatttcaggtgaccaggtttatcgtgacttttccttcttgtttacttttcgctaggaaggggagttgtaggggcagattcaggtattggaataggaaaattacgtctaaaccatggaaatcttggaaatggaattggtggaagtgggcgaaatggatatgggtaagggaacacaaaaaaccctgaagctaattcatcgctgtcactgatacttcttttttctcgttcctggtcttgagagactgggaaaccaacagccactgccaagatggctgtgatcaggaggagaactttcttcatctcaaacgtttcagtcagttctttctctctgacgctgcctcgtgccgaattcttggcctcgagggccaaattccctatagtgagtcgtattaaatt

SEQ ID NO: 2636 - DNA, 512 bp, Homo sapiens
  misc_feature 492: n = A,T,C or G
actccagcctgggcgacagagcaagactccacctcaaaaaagaaatatttagcaaatattaaaggacaagagggaatatctgtttaaaaaattataatgcacgttagatgaaaagtaataggatgagatggttgttgctgaaatagcacttgctatataaattcaaacattccttttcaaattcagcttctcagaggtttgacttcagatgcttgagcactttcaacattatctttgcctttatccttctttatgcggataaacacaactgctaaaattataccaatcaccagaagggtggtcagcagtataccaactgccatgcccacagtgggtatcccagtctggtgacctgctggccggaaacaacttccttccacacaactgcagaatgtaactggtaaagaaacaatgccttccaagggtggccgacccccatcattgatgcggatcaagacgacatacgccctctcctcaaagtctgtgtgcctngtagacagtcgggcatgagt

SEQ ID NO: 2637 - DNA, 573 bp, Homo sapiens
  misc_feature 554: n = A,T,C or G
accatttgcctcccgggctcaagcgattctcctgcctcagcctcccaagtagctgggattacaggcacctgccaccatgcccggctaatttttgtaattttagtagagacagggtttcaccatgttgcccaggctggtttcgaactcctgacctcaggtgatccacccgcctcggcctcccaaagtgctgggattacaggcttgagcccccgcgcccagccatcaaaatgctttttatttctgcatatgttgaatactttttacaatttaaaaaaatgatctgttttgaaggcaaaattgcaaatcttgaaattaagaaggcaaaaatgtaaaggagtcaaaactataaatcaagtatttgggaagtgaagactggaagctaatttgcattaaattcacaaacttttatactctttctgtatatacattttttttctttaaaaaacaactatggatcagaatagccacatttagaacactttttgttatcagtcaatatttttagatagttagaacctggtcctaagcctaaaagtgggcttgattctgcagtnaatcttttacaactgcctc

SEQ ID NO: 2638 - DNA, 486 bp, Homo sapiens
acaaattcagtcccaatactcaatacgtattatagatgactatgagtgcaaaccttaggatgtgattttctgaataattgttctttgtaggatttggttacattatttaaaatgaaaaagatctagttttagtgtgagctcagtaatgttaattggttaagttcattgtgaatcttgagttttagataagtagttatttttttcaatatcacttctgtttttagtgatattatatcaagaaacaacgtattcaagagccatggctgacagtgccagatatacttagggataaacatcaaaatgcaattatagttgctataacgttagatactcggaatcaaaatttatttgcaagctgacttgataaactaaatgaaccaataaaatttgtagaaatgctatcctgaaataattatatacatgaagacaatgttgactaatgaattaagatacattatatactagttaatgctaactagtctcagt

SEQ ID NO: 2639 - DNA, 212 bp, Homo sapiens
actgaggctggaggaggtgcaggctaaactagggattagtctagaagaaatgctgttggtcacagaagatgcccttcatcctgaaccctataaccctgaggagatctgcaggtgtctgggaattagcctggaggaactccgaacccaaatcctgagtccaaacactcaagatgtgctcatcttcaaactctatcagcgggcaaagcatgtgt

SEQ ID NO: 2640 - DNA, 532 bp, Homo sapiens
acagtatctaaatatcccatttatgataggactagtccaatagttttcagaagactttccaaagcatttttacatacttgaacttcttgagccttccagttgtattactaatgctaaatgattaattcattcttgatgacctttaatatataaaagatctggcaattacctagagtagtaaatatttagacagtgagtttacagaaatggcatttatgtaaaaagtaacattacgctattcattactcattgaataaatgccaggaaatagagaagtttgtattaaccatacacaaaacatttatttcaatataagcaaagccatgtgatttttaaatttttaacttttgtagacttgaccaatgttctttatttattcttttattttattttaatttagtttgtttcacttttcaggtgtaacaaactctcttatgggtataatgatagaatagaaagaaaaaaggaaaaataaatatgtaataagacttttaaaaagaatggtaagatcaaaatagcataaccaatataa

SEQ ID NO: 2641 - DNA, 490 bp, Homo sapiens
acattgtgaacttcgatagacatgttcacagaataacttgttattacttggtttaaaagtgcaatcctagttcatttgtttatatattttctaaaagtttttatagatctctgaattaaaatacttgtaatgatatttctgcttttatctgtattttatgttccaaaacttcacaaattatactgttaactaggtttgtataccataaagacaaatgttgaataaatagctgttctttcaatttctttaaaaaaaagatccaagatgggcattatattcattgtatgtttacaaattcttacattttagttattcttcagcaaaaaatccagatggatgtttttttcagaaagtgttgaatgggtttacaaagtttttttgtaaggaacaatattgcaaattactaaaattgtatttttataggctgtttgctcttttgtggatattgtgcctgtcaggattcttgaagttttttttttttatagtgaga

SEQ ID NO: 2642 - DNA, 249 bp, Homo sapiens
  misc_feature 49, 54, 96, 160, 206, 231: n = A,T,C or G
acaagcttttttttttttttttttttttttttttttctgttatacaaanagcanatttttattgaacttgtgcaataactatattaccatacaatntaaatattcatgaatagtttcccaagtctggagcgaccacatagggagaaaatgtaaatgtctnaatttttgttcaaaaaagtatattttatcaaattgctgtaagctgnggatagcttaaaagaaaaaaagttncctgaaatctgggaaaca

SEQ ID NO: 2643 - DNA, 492 bp, Homo sapiens
  misc_feature 484, 487: n = A,T,C or G
accctgcaaagccacaggggcagagctgctcaagaccatgggaacctacctcttgtatcagcatgacctggatgtgagacatggagtcaaaggagaacattttggagctctaagatttgactgccctgctggattttggacttgcatggggcctgtagcccctttgttttggccagtttctcccatttggaatggctatatttacccaatgcctatacccccattgtatccaggaagtaactaacctgcttttgattttacaggctcataggtggaagggacttgccttgtctcagatgagactttagactgtggacttttgagttaatgctgaaatgagttaagactttgggggactgttagaaaggcatgattggttttgaaatgcgagatcatgagatttgggaggggccaggggcagaatgatatggtttggctgtgtccccatccgaatctcatcttgaatttctgtgtgttgtggganggnacagg

SEQ ID NO: 2644 - DNA, 143 bp, Homo sapiens
aaaaaaaaagagaaagaaaaagggaaaggtaagtttcacggagagaacaaaaggtttggggctgggagggaaacaagtgaaacaaacaaaacacgaacacaaaccaaagcttttacctaaagacaaaatatgatttaaatgcc

SEQ ID NO: 2645 - DNA, 543 bp, Homo sapiens
ggcgcggggctgaaggctagcaaaccgagcgatcatgtcgcacaaacaaatttactattcggacaaatacgacgacgaggagtttgagtatcgacatgtcatgctgcccaaggacatagccaagctggtccctaaaacccatctgatgtctgaatctgaatggaggaatcttggcgttcagcagagtcagggatgggtccattatatgatccatgaaccagaacctcacatcttgctgttccggcgcccactacccaagaaaccaaagaaatgaagctggcaagctacttttcagcctcaagctttacacagctgtccttacttcctaacatctttctgataacattattatgttgccttcttgtttctcactttgatatttaaaagatgttcaatacactgtttgaatgtgctggtaactgctttgcttcttgagtagagccaccaccaccatagcccagccagatgagtgctctgtggacccacagcctaagctgagtgtggccccagaagccacgatgtgctctgtatccagaacacact

SEQ ID NO: 2646 - DNA, 267 bp, Homo sapiens; identical to SEQ ID NO: 2565

SEQ ID NO: 2647 - DNA, 585 bp, Homo sapiens
  misc_feature 553: n = A,T,C or G
tttaaatgaaaattacaaaatgtttgagaccctattttggaatacaaagggtgtttgacttccaatttccattctctgtagaacaagaacaggtcattcctttattgacatgcataaaatacatcacattttctgttctgctgatgctataaattcaataccaattctccagccacatcagttatgagcataaagcatatcatgtaacctcaaatctctaacagtggaaggcttaaacaagaatggatgctgctagaataatgctgtatcctttgatgtgacaactgagcatccatctccctccccctcagatgatttcttcagcatgttagagcagtgaggaatggttttagtctcataaccaagttagagtgaagacattggccacataatacacatgctccatttttttttttaaaaattctgagtcttgggcaactgttctcttgtaactactttacagtttctaaaagcagttattgtccaaagctggaagaacttaagtcttctcagatgagcatgtgaatgaatggagggaggtaaacaaaaaatnaaattaaaaagatgaggtctgataggggagca

SEQ ID NO: 2648 - DNA, 367 bp, Homo sapiens
acagaatatttaatgagtctgtcttgccccaaaagggaaaaacacaagtagctaagccatttgcagagaggaaaaatgtcatggaaaaatgaaaaatctctctaatgtctatagcacatgaaatatctaagtaggtgggtgcagtggttcatgcctgtattgggagaccaaggcaggcagatcacttgacgtcaggagttcaagaccagcctggccaaatggcgaaaccccgtctctattaaaaatacaaaaattagctgggcatggtggtgggtgcctgtaaacccagctacttaggaagctgaggcaggagaatcatgtgaacccaggaggcggaggttgcagtgagctgggatcacaccactgt

SEQ ID NO: 2649 - DNA, 422 bp, Homo sapiens
acaggcggtttagggataaagtggaagtttgagagggcatccaattttaagaagagggaatccatcatcttctgaatttctacatgttctggattttcttcttctgctgttttttgcttaggaaataagttcaacaatgtcaaactaagcgacttgatatatatcacaggacaaaacactaaaggtcaatgagagtatttctaacttctcatcactaaagcttcagctacaaagaaacattccaaaagcaaaattaaaagcagcagtgtggactgagagccacgctgctcagtctgtttcgtcagccgactcaggttattttcagggaaggcatggaggcatagtttggttagtttcatcactaggatgtataaggtgacgacacaaaccaaatacctttctctcatcacttaactatacgt

SEQ ID NO: 2650 - DNA, 467 bp, Homo sapiens
  misc_feature 196, 197, 198: n = A,T,C or G
acatggccaccaagtaagaatggttggtgacaagacagaaggctaaaacaggaaggtaatcttgtgcacctgacaaatagaaagaataaaggatcaaaattgaaggcaggctataagagtatcaagaaattcttaaaaaccaaaaagtgatttggaagcacaaaacttacagttaatgctacccaatgtcatgatnnngccaagaacattgtggcttcctaagttagaaaatgccatatgccaaaattttaaatggaacacactacatttttttctaatcaatccccccctctcccagaaaaaataggaactcatttttttcagggtggggaggaagagaggggatcatgggacatggaaacagtagttatattagtagtatttttgttatgataaattttgtgtttaaacttggtaagagcccattagctgccaagagggaataaggaataaatttcaaaaaatgt

SEQ ID NO: 2651 - DNA, 79 bp, Homo sapiens
  misc_feature 32, 39, 67: n = A,T,C or G
acttattcgaatgatatacttgtgagctgttncatggtnataatcatccccaggagctgtccaagtnagattaatgaga

SEQ ID NO: 2652 - DNA, 308 bp, Homo sapiens
acaggtctctgtaaaaagtccttgctgtctcagcagccaatcaacttatagtttatttttttctgggtttttgttttgttttgttttctttctaatcgaggtgtgaaaaagttctaggttcagttgaagttctgatgaagaaacacaattgagattttttcagtgataaaatctgcatatttgtatttcaacaatgtagctaaaacttgatgtaaattcctcctttttttccttttttggcttaatgaatatcatttattcagtatgaaatctttatactatatgttccacgtgttaagaataaatgt

SEQ ID NO: 2653 - DNA, 252 bp, Homo sapiens
acatttatcagttagggtggggcaggaacaaatcacaatgttggaatgtcatcagttaaggctgtttttacttcttttgtggatcttcagttactttaggccatctggatgtatacgtgcaagtcacaggggatgcgatggcctggcctgggctcagaggcttgacattcctgtctttttatattaataagaaacacaaaacaaaacagtggtggagtattgggatggcaaaaatgtttgggggtggtatgg

SEQ ID NO: 2654 - DNA, 329 bp, Homo sapiens
acctgaggttctctcaacagaaagaagttgcaagtgggacctcctcatgccaccctcatccccaataggaacaattaggccaggctttgatgtcactgaggaggggaccagcacgcctctgaggacagtaggaaaaacctaggcaggtgttagagcagggagtggggtccccaggagctgagggccccaggatcgacatgattctgaaggtgattgtcatgggtgcagggagcagacggcgacaccgtctaggcttcctgggggccgtcctgggcctcggcggccacggtgctggactggagcaggaagtctttgtaggccatctcggc

SEQ ID NO: 2655 - DNA, 320 bp, Homo sapiens
actttggaattcttagtcacaaaatatattttgtttacaaaaatttctgtaaaacaggttataacagtgtttaaagtctcagtttcttgcttggggaacttgtgtccctaatgtgtttagattgctagattgctaaggagctgatactttgacagtgtttttagacctgtgttactaaaaaaaagatgaatgtcctgaaaagggtgttgggagggtggttcaacaaagaaacaaagatgttatggtgtttagatttatggttgttaaaaatgtcatctcaagtcaagtcactggtctgtttgcatttgatacatttttgt

SEQ ID NO: 2656 - DNA, 403 bp, Homo sapiens
  misc_feature 120, 121, 385, 395: n = A,T,C or G
gttcaaaattcttctcaaaaaactcagaatgatgtggacatagctgatgtggcttattattttgaaaaagatgttaaaggtgaatccttgtttcattctaagaaaatggacctgacagtnnatggggaacaactggatctggatcctggtcaaactttaatttattatgttgatgaaaaagcacctgaattctcaatgcagggtctaaaagctggtgttattgctgttattgtggttgtggtgatagcagttgttgctggaattgttgtgctggttatttccagaaagaagagaatggcaaagtatgagaaggctgagataaaggagatgggtgagatgcatagggaacttaatgcataactatataatttgaagattatagaanaagggaaatngcaaatgg

SEQ ID NO: 2657 - DNA, 432 bp, Homo sapiens
  misc_feature 388, 425: n = A,T,C or G
accagtagatcagctgcctagcgagggcaggtttcttctttgcatctgtgtggcttgcttccagtctggcctgtcctttccagctgccttttgtctagcctgctatggggggccagattatcttgataagagcaggtgatttggggactagctgggttggcaggaaaagagcaggatggatctcttgggacaggttcccccaggagtataaacacaaggagccaggattgtgctggcagccaaggaaacagtagtgcctgtttgagttggcagagagggccttggcacctcttgcatccaggcagtcttgtgagatgggggcacatagcactggggaaagcagaactccattctcacctctattttgagcttcagtgctttatttcantatgaggaaaaacaacaacaaactgaagtgcgctttncgtcctt

SEQ ID NO: 2658 - DNA, 288 bp, Homo sapiens
accactctttggatgtgatagcattcctgctggcctgcgtggcaactatgatatttatgatcacaaaatgttgcctgttttgtttccgaaagcttgccaaaacaggaaagaagaagaaaagggattagttatatcaaaagcctgaagtggaatgaccaaaagatgggactcctcctttattccagcatggagggttttaaatggaggatttcctttttcctgcgacaaaacgtcttttcacaacttaccctgttaagtcaaaatttattttccaggaatttaatatgt

SEQ ID NO: 2659 - DNA, 383 bp, Homo sapiens
actgggattatataggcatgagccactgagcctggcccagaagcgtttttctcaaaggccctcagtgagataaattagatttggcatctcctgtcctgggccagggatctctctacaagagcccctgcccctctgttggaggcacagttttagaataaggaggaggagggagaagagaaaatgtaaaggagggagatctttcccaggccgcaccatttctgtcactcacatggacccaagataaaagaatggccaaaccctcacaacccctgatgtttgaagagttccaagttgaagggaaacaaagaagtgtttgatggtgccagagaggggctgctctccagaaagctaaaatttaatttcttttttcctctgagttctgt

SEQ ID NO: 2660 - DNA, 87 bp, Homo sapiens
gggttctttgtttttggggtttggcagagatgtgtttaagtgctgtggccagaagcggggggagggggggtttggtggaaatttttt

SEQ ID NO: 2661 - DNA, 271 bp, Homo sapiens
ggagctggcaaggtcaccaagtctgcccagaaagctcagaaggctaaatgaatattatccctaatacctgccaccccactcttaatcagtggtggaagaacggtctcagaactgtttgtttcaattggccatttaagtttagtagtaaaagactggttaatgataacaatgcatcgtaaaaccttcagaaggaaaggagaatgttttgtggaccactttggttttcttttttgcgtgtggcagttttaagttattagtttttaaaatcagt

SEQ ID NO: 2662 - DNA, 348 bp, Homo sapiens
  misc_feature 264, 329: n = A,T,C or G
acaaacttacagtagtgtatattccaaataaaggtttttcttcctactatggtatgacaatataactgttttctgaatgaagatacatgttaaggcttaaggtgtaaacactttggaaggcaaacagcttagtgaaaaaaattatggttcatttaaaaatgtgtatcatttcataatagacccctgaactttcaaatttacatgtgagaatacatttacatcttaactttctaggaaaggcacaggctttatgtaaaaaagcancaaagttttaaacccaccaatatattgacaaagccattacttttattagaaacaaataatgcttntcaaggtgttggcaacatg

SEQ ID NO: 2663 - DNA, 304 bp, Homo sapiens
  misc_feature 233: n = A,T,C or G
actttcctagatgacatatcgagtcaacatgaagccttagctaaaatgaatgattcaggatattaatgagaaattctcacaaatgatatgcatttaggaaatgattttgctttccttaaatagttcgaaggcttgaaaataaactttttttttgcatttcttttagaatgtttggtcattaacaacttttaaccttatcttcctcttctccttagcccttaacagaccgagtncattctatttggaaataacaagaacttgatcagattattaaatcttggaaacctcatttttaccttataaa

SEQ ID NO: 2664 - DNA, 379 bp, Homo sapiens
acttgagtattttatgggttctgctctaagctgaagcagaactgcctgtctgagaaccctgaactaggttagttttgtgggtccttcgtggggcagcatctatgtaggaggctggactttgggttcctcttgaaataatgaggtccctagagggatccttagaaccaactaatcctaccaagagcttttaaaacatgctggtcaaatatggcgattccctggtgcaacccccagatctcctggtctgttaggcagccctgataactctcaagtaatcctgtagtccactggtaaaaaatagatgggtcccatgataccatatagtatctatgcttattggctgggcctcctggtggctcttggcactgtaatttctagt

SEQ ID NO: 2665 - DNA, 74 bp, Homo sapiens
  misc_feature 7, 19: n = A,T,C or G
ggcccancagccaccacancgcctgcttcctcggccctgaaatcatgcccctaggtctcctgtggctgggccta

SEQ ID NO: 2666 - DNA, 383 bp, Homo sapiens
gctgtaggtctcttcttgcatgtccacagtaatgtatttgtggtttttattttgaacgcttgcttttagagagaaaacaatatagccccctacccttttcccaatcctttgccctcaaatcagtgacccaggggagggggggatttaaagggaaggagtgggcaaaacacataaaatgaatttattatatctaagctctgtagcaggattcatgtcgttctttgacagttctttctctttcctgtatatgcaataacaaggttttaaaaaaataataaagaagtgagactattagacaaagtatttatgtaattatttgataactcttgtaaataggtggaatatgaatgcttggaaaattaaactttaatttattgacattg

SEQ ID NO: 2667 - DNA, 480 bp, Homo sapiens
actttgatactgctcatgctgacttaaaacactagcagtaaaacgctgtaaactgtaacattaaattgaatgaccattacttttattaatgatctttcttaaatattctatattttaatggatctactgacattagcactttgtacagtacagtcctatgtagagtgtagtgcagagaagccagctggtaggcttttgccccctggtggtgatcaggagtgcctgtgagacaaaattaaacaaagatgtatggttcacagattaaacaatctggctccgtagtaaacaggaaaagagaaggcaagtttcagaagtaagaactttgaaccaatgcatgggagaccaaagaggaaactagatacatagccaaaaaatacacatagctagaagctgaatgaactcaaataaatgaaatatatgtgctttatgaaccaaagtatcattctagaaaaagtaatattcaaatctgtaggtcttagt

SEQ ID NO: 2668 - DNA, 420 bp, Homo sapiens
ggcgggcacgatcgcaaggtagcgcagaagcttctcaatggccagcgccagctgcagccccggcggcgcactcgcctcacctgagcctgggaggaaaattcttccaaggatgatctcccactcagagctgaggaagcttttctactcagcagatgctgtgtgttttgatgttgacagcacggtcatcagtgaagaaggaatcggatgctttcattggatttggaggaaatgtgatcaggcaacaagtcaaggataacgccaaatggtatatcactgattttgtagagctgctgggagaaccggaagaataacatccattgtcatacagctccaaacaacttcagatgaatttttacaagttacacagattgatactgtttgcttacaattgcctattacaacttgctatagaaagttggt

SEQ ID NO: 2669 - DNA, 117 bp, Homo sapiens
actcttaggcaacaaactaagaaaaaaccctgtgcaggcagggacctgaggagttattaacgatcgggaagatttcagggcggatgaaactctcctacaaagaagggccaaaccggc

SEQ ID NO: 2670 - DNA, 214 bp, Homo sapiens
  misc_feature 165: n = A,T,C or G
ctgcaagttatggcattgccgtgggctgctgctgtgccagtggaaacacaggccaccatggggacaatttggaggatgaggaagaagaatgtgtgaaggggggggggatacgttttaaactgagtctgctaggaggagttgcctaagctaaaaagagtggttcangaagcagaaccgttatatgcaaaagcatgtaatgaacatagagatcacg

SEQ ID NO: 2671 - DNA, 507 bp, Homo sapiens
acagacatcatttaaaaaatgcacatacaatggagattttccaaggaacaggagctggaaataaaatttaaggacattattagaactgaaattgtcccagagaagttctgaggatcaggattccttaaatgtccttgataacctcttcaagttcttcctttgtgaacatgtggaaattctggccagactgcactgtggctagctggaaagaaaacagaagggttaataagctgggctgagttaccctgctgatggccctaccatggtcaggagaagctgtgttggtgatgcagctattcattaggaactaagggatctgctgtcccaaggatatcctttccaggcagcaggtccctaaaatagctctctggctccaaaataaaaatgcttattgaccaaattttctattttaaggttaactcaccacatcatacttaaccaaatgcctggcatcattgtcacttcttgaagtcacttcaacagggatcacaaaagcagcagcaaagt

SEQ ID NO: 2672 - DNA, 417 bp, Homo sapiens
  misc_feature 399, 400: n = A,T,C or G
ctcctttgaaaactctgtgtttggaatatctctaaaaacatagaaaacactacagtggtttagaaattactaattttacttctaagtcattcataaaccttgtctatgaaatgacttcttaaatatttagttgatagactgctacaggtaatagggacttagcaagctcttttatatgctaaaggagcatctatcagattaagttagaacatttgctgtcagccacatattgagatgacactaggtgcaatagcagggatagattttgttggtgagtagtctcatgccttgagatctgtggtggtcttcaaaatggtggccagccagatcaaggatgtagtatctcatagtttccaggtgatatttttcttattagaaaaatattataactcatttgtnngtttgacacttatagat

SEQ ID NO: 2673 - DNA, 326 bp, Homo sapiens
  misc_feature 29: n = A,T,C or G
atttaaaatactgttactaccaaagattnttattaataaaggcttatattttggtaacacttctctatatttttactcacaggaatgtcactgttggacaattattttaaaagtgtataaaaccaagtctcataaatgatatgagtgatctaaatttgcagcaatgatactaaacaactctctgaaatttctcaagcaccaagagaaacatcattttagcaaaggccaggaggaaaaatagaaataaatttgtcttgaagatctcattgatgtgatgttacattccctttaatctgccaactgtggtcaaagttcataggtgtcgt

SEQ ID NO: 2674 - DNA, 241 bp, Homo sapiens
actcagcagaagccactttgtaatcactggcagtaaagagagatgcagaattctttgccagatattttaggaaatcatgcaaatagcccaacaataatgcaaggcttttctcatcaaggggcgtataggccaacattgctccaattcttacaaataatctcagtaggtgtggtgctccataaacctgggacattggagcatcagggtgagccaagaggatttcagcatactggggcctctc

SEQ ID NO: 2675 - DNA, 302 bp, Homo sapiens
  misc_feature 251, 265, 292, 293, 294: n = A,T,C or G
gtcagtggcctggatcatagccctggatcatttcccagtctgtcctgtgctgtgtgaccttggacaaggcgcttcatctctctgggcctctatttctccatttgtaaaacaagtggctgcagtagatgatggctgagagcccttcctgttcccagatgccttggtccaaagaccccacccctctgctggtcctgccaacgtgttggtgctataagctgcttcagatataaaattggtttatctataatgtntgttcatttaatancttctaaaaggcctttttgttatacannngctttttt

SEQ ID NO: 2676 - DNA, 348 bp, Homo sapiens
acatcataatcggcgacacaggtgttggtaaatcatgcttattgctacagtttacagacaagaggtttcagccagtgcatgaccttactattggtgtagagttcggtgctcgaatgataactattgatgggaaacagataaaacttcagatatgggatacggcagggcaagaatcctttcgttccatcacaaggtcgtattacagaggtgcagcaggagctttactagtttacgatattacacggagagatacattcaaccacttgacaacctggttagaagatgcccgccagcattccaattccaacatggtcattatgcttattggaaataaaagtgatttagaat

SEQ ID NO: 2677 - DNA, 560 bp, Homo sapiens
acccatatttatatttttataaaatacctataagactgtgaatctcttgtgctaatggctgagttaattgaaggatcgttttgcccctttttagcctcccagagcttcgaggactcaattcgaacccgaaatcctgccgtgggggaggggttgcgtcgagacctgggcccggggaggttctcctgcgtcactttctgtcctgaaaggcgcccttcctggtttctgtggctccaattttctatgcagccccacaccccttgttgttttgatcctgagaaataaaagggaggctgaattattcaaatttaaatgaggtttccccttcatggaagtgctgctgacccttcgtgcagaaatggggagcacttgaggacacaggtgggtggaggccctttgtgcgtggctggtcgtattcgggcagccctccgtcgctttttataaaactttgtgtgagaagaatatattgataatgtcagtgaaacaagcagacattgaaatggaggcacagattactccacaaggagttcttctgtatattttttctagatgcaaataccttt

SEQ ID NO: 2678 - DNA, 324 bp, Homo sapiens
cggccgaggtcatttacccatctctcaggacacggaagcagcgggtttggactctttattcggtgcagaactcggcaaggggcagcttaccctccccagaacccaggatcatcctgtctggctgcagtgagagaccaacccctaacaagggctgggccacagcagggagtccagccctaccttcttcccttggcagctggagaaatctggtttcaatataactcatttaaaaatttatgccacagtccttataattggaaaaatactggtgcccaggttttcttggagttatccaagcagctgcgcccctagctgggatctggt

SEQ ID NO: 2679 - DNA, 236 bp, Homo sapiens
  misc_feature 64, 204, 209: n = A,T,C or G
ctaaagccagtggcagtgtatgctcatacttggacagttagggaagggtttgccaagttttaanagaagatgtgatttattttgaaatttgtttctgttttgtttttaaatcaaactgtaaaacttaaaactgaaaaattttattggtaggatttatatctaagtttggttagccttagtttctcagacttgttgtctattatntgtangtggaagaaatttaggaagcgaaatat

SEQ ID NO: 2680 - DNA, 171 bp, Homo sapiens
caggaaccttcagatagcagtagaggactgcagctgtctaggtctgcggccacatcttggggacacactggactgttcccatgtgcagggttcagcagttatgtgggagtgctaggggttaggcttttgagcttgaacgcctgcgtgtgaacagatgaaaaatccttcagt

SEQ ID NO: 2681 - DNA, 587 bp, Homo sapiens
  misc_feature 585: n = A,T,C or G
aagcttgcggccgcaaaccttttttttttttttttttgctttcaagtttattaaagaagatcactaaagatattgactagagaatgctgtgtgctatttcaattacatttgtttttcttttattaacaggaattttgattcttcaaggaagtggctcaatttcaatttcaggtgaccaggtttatcgtgacttttccttcttgtttacttttcgctaggaaggggagttgtaggggcagattcaggtattggaataggaaaattacgtctaaaccatggaaatcttggaaatggaattggtggaagtgggcgaaatggatatgggtaagggaacacaaaaaaccctgaagctaattcatcgctgtcactgatacttcttttttctcgttcctggtcttgagagactgggaaaccaacagccactgccaagatggctgtgatcaggaggagaactttcttcatctcaaacgtttcagtcagttctttctctctgacgctgcctcgtgccgaattcttggcctcgagggccaaattccctatagtgagtcgtattaaattcgtaatcatgtcatagctgtttcctgngt

SEQ ID NO: 2682 - DNA, 347 bp, Homo sapiens
  misc_feature 330: n = A,T,C or G
accttattatcctacatcgcaaatttcaacagctacattatatttccttctgacacttggaaggtattgaaatttctagaaatgtatccttctcacaaagtagagaccaagagaaaaactcattgattgggtttctacttctttcaaggactcaggaaatttcactttgaactgaggccaagtgagctgttaagataacccacacttaaactaaaggctaagaatataggcttgatgggaaattgaaggtaggctgagtattgggaatccaaattgaattttgattctccttggcagtgaactactttgaagaagtggtcaatgggttgntgctgccatgagcatgt

SEQ ID NO: 2683 - DNA, 384 bp, Homo sapiens
cagtaaatggggaacaactggatctggatcctggtcaaactttaatttattatgttgatgaaaaagcacctgaattctcaatgcagggtctaaaagctggtgttattgctgttattgtggttgtggtgatagcagttgttgctggaattgttgtgctggttatttccagaaagaagagaatggcaaagtatgagaaggctgagataaaggagatgggtgagatgcatagggaactcaatgcataactatataatttgaagattatagaagaagggaaatagcaaatggacacaaattacaaatgtgtgtgcgtgggacgaagacatctttgaaggtcatgagtttgttagtttaacatcatatatttgtaatagtgaaacctgt

SEQ ID NO: 2684 - DNA, 217 bp, Homo sapiens
  misc_feature 138: n = A,T,C or G
actgaattcagtgcttagaactgaagttattgagaggacagctttaaaagatgaatgaactcaaaagttcgagttgtgctcttcacgttggttcgataatggcctttatttgaaagctttttaatttttctttacagnaaatattccattctgatttcataaattaaacatttatgcctcccttttgtgttgacactgtagctcatactggaaaagt

SEQ ID NO: 2685 - DNA, 314 bp, Homo sapiens
  misc_feature 22: n = A,T,C or G
tttggggagcacttcgagttcnactgcaagaactgtgtctgcctggagggtggaagtggcatcatctgccaacccaagaggtgcagccagaagcccgttacccactgcgtggaagacggcacctacctcgccacggaggtcaaccctgccgacacctgctgcaacattaccgtctgcaagtgcaacaccagcctgtgcaaagagaagccctccgtgtgcccgctgggattcgaagtgaagagcaagatggtgcctggaaggtgctgtcccttctactggtgtgagtccaagggggtgtgtgttcacgggaatgc

SEQ ID NO: 2686 - DNA, 525 bp, Homo sapiens
acaccaagcgtgcagtcctattttgagaaagtccattttgccagggaatacaacttgaggtcattagtaactagttgaatatgatttaaatatgtctgcatttagatgaacagaacagggtaaaaggaactttgccaagccaagctcaattcctggccaaataatgggggagaactgtcagtgcccacacccatttctcagtggtcagtttcagccgctgttgactgaagacaaacgaactcactatgttcttcacaaagatcattttttttaagtaagaaaaatgtttcaactctcttgcctttccttcagcgaatgaaatgtgacgggctaaatacgccagtcactcatgcgccgcagggacacatggtgcagactggcgtgcccaggtagccaaacagaattccccaagaccttttatttgtttaaaatactttggtgtcagcagagtctgagcagacacgttactcatgatgctcgggagaccaggcagggccctgctgagctcttctgaaagtatgtgga

SEQ ID NO: 2687 - DNA, 527 bp, Homo sapiens
acacccacttcaaaacacatctgtatgtgaatgcacatctgagtactgacttctatctgagaagaacaaaccaaaacactcaggcctaaataattaaaaacggtcctaaaaactagcaaaccagataagaaaagatgttaatgcccattccctaacttatatcttagaccaaaattaattctagatggttataaaatgacagtgtaaaagtaaagtattaaaagattgtgtggtcaaatattcaatttaagagcaaggaaattcttataaatataacaatagaggtagaactcatgtaagaataaattgattaggtggtattaaatattaagttcttatgtatgtcaaaagatatcattttgaaattcatccatcttattgggtattgcaggagttcattcctttttgtttataaatactcttccgtcatatgaatagtattcatttgtatactggtttgttgatggacatttgggttgttcccagtttatggctattacaaataaagcttctatgaacatttatgt

SEQ ID NO: 2688 - DNA, 587 bp, Homo sapiens
  misc_feature 469, 535, 551, 556, 574: n = A,T,C or G
ggattctgttgccttattgggaactgtgagacttatctggtatgagaagccagtaataaacctttgacctgttttaaccaatgaagattatgaatatgttaatatgatgtaaattgctatttaagtgtaaagcagttctaagttttagtatttgggggattggtttttattatttttttcctttttgaaaaatactgagggatcttttgataaagttagtaatgcatgttagattttagttttgcaagcatgttgtttttcaaatatatcaagtatagaaaaaggtaaaacagttaagaaggaaggcaattatattattcttctgtagttaagcaaacacttgttgagtgcctgctatgtgcacggcatgggcccatatgtgtgaggagcttgtctaattatgtaggaagcaatagatctcggtagttacgtattgggcagatacttactgtatgaatgaaagaacatnacagtaatcacaatatcagagctgaattatcctcagtgtagcttcttggaattcagtttctggaanctagagatagagcatntattnaaaaaaactcctgttganactgtgtcttatg

SEQ ID NO: 2689 - DNA, 252 bp, Homo sapiens
acaatgttaaacttcaattcctgtaacctggttagtattaatgtcagtgactaaaaaacttagagttagttttagggcactttttattttgagagcatgaagtgtggaatgtgtcactacgattgttgataaagctgaggccacttgcaacttgattttttaaatgaaatagataaagtctttttgaataatatagtatgcactgctatttgcttgattatgtaatgtcaaaagtttaactatattccaagt

SEQ ID NO: 2690 - DNA, 554 bp, Homo sapiens
acatttaaatttttggtggtggtttgtgttttaaaagaaacagcttccttacgatttgcctcaagttctggtggaaatgcttacaggaactagctaataaacaaaaaacaagagaagcacattcaaaatactgatttactttggtagcaaatggtttttctttgaagactaatgaagatagacaagacccattaaggtgaagtggactatttcaaatattcaacagtttacataaaaaaaaatcttttaagagctaagcgtctgtatccacggatagcaatgcaatacctagtttatgatgacttgaaacaaaacaaatgcccataaggaaaaaagctgtattttatctaaatttactttcagtcaatagttcagtaacattttcttcccaatacaatactccctctctctataaggctgttcctgggagccagacaagtttaggtaataagggagttaagagagttaactgcttgcagttttaaatagacagtaactttgcttccctcttaatgtgctaatagttgtgtctaaaaaaatatgcaattcttaaa

SEQ ID NO: 2691 - DNA, 538 bp, Homo sapiens
acaaacctctgctcccagtggccacattcctgcagtggatgaaaaaccgagatgctagaggcctctgctaaagacatcagggtcaacacatgaggatctgctgaaaatgccagcacctcctgacagtcatgccaccgcaagttagagaaggaggtccacaacgaccaaggcaaacatttggcacagaaatgaggcacttggtttggtgcatcaataggagctaaaaagtggaatggtccacctgctttcacacacgcatacacgcacgcatgcacacacgcacacacacacaacacccactgtgatttggctgcttccaactctgcctgtttctaagttttcctcggcccctcactttaaagcagagttcacaaagcacattcccaaaccccagctccctgacaggagcttgtgacaccagtgtggcctaagaatgggggatttgacttttgaaagcagaggagggaatttcgggctggatcgcaatcaggacagtcagcatgcctgcagagcacctaggctgtgagaggatggggcc

SEQ ID NO: 2692 - DNA, 564 bp, Homo sapiens
actatgttaaacattctatatacatggtctcatatagtccttacgagtcaatgtggtaggtaatcctatattcctattttagagatgaacaaaaaaaaaggctttgagaatttatcaaggacccataataatccacagaacctaaattcaaatccttttgtccaactccgaagacttatctcttaaccacttcataagattaaaacgctgaaggggcacatactgttatgaattttaatggctcctacacatgcatcctttatatatacccttcatgatttttcaaaccatgtcagattctcatttttcaattctcaagatacagcatcttcttatagcatcttcaccacctttcccgtttactgtcttaaatgtgcccaatctcggaaatatcaataacaaaacaagcttgttgacattttgtgaaacatttaaggagacttccaaggaatgtaacatatgtagactttgtgacacatatattggcatgtggtcacagctctgttctgagatgagatgttactattttggctttgagacatgaaggatatgacattttaagtc

SEQ ID NO: 2693 - DNA, 465 bp, Homo sapiens
  misc_feature 122: n = A,T,C or G
acacttctgtcttcaaactgtatcttctttggatggaattaagatgtaactgtatagttttaagataaataaatgggaagttggtccaactaagatgacagcagatatattacatgcagganttaatattttctaattctctcttttaaaaaaaaggatgctgttggattgggaaaaaaaaagtcaaaaaagaacccagattcaatatataaaaatgtcccacaataggtcgacaatggcagtaaaaataagaggaaaaaagtaatctttctggaacatcatttttcaataacatagaaacactaagtgccaggaagattcctattcatgtaattttagcatccaagtttccctctatttattttattggaacaaatgctttaaataaactatttgtcctcttcactgaagagagctggtctatttcatctttaatgagctagtttttgggaagattagccatgt

SEQ ID NO: 2694 - DNA, 408 bp, Homo sapiens
  misc_feature 325, 334, 338, 339, 400, 401: n = A,T,C or G
acttgcgcttactttgtagccttcatcagggtttgctgaagatggcggtatataggctgagcaagaggtggtgaggttgatcggggtttatcgattacagaacaggctcctctagagggatatgaagcaccgccaggtcctttgagttttaagctgtggctcgtagtgttctggcgagcagttttgttgatttaactgttgaggtttagggctaagcatagtggggtatctaatcccagtttgggtcttagctattgtgtgttcagatatgttaaagccactttcgtagtctattttgtgtcaactggagttttttacaactcangtgagtttnagcnntattggggagggggtgatctaaacactctttacgccggcttctattgacttgggttaatcnngtgaccg

SEQ ID NO: 2695 - DNA, 416 bp, Homo sapiens
  misc_feature 262, 346, 356: n = A,T,C or G
acagcagccttggttcctctgggggttgagaataagaatagtggggagggaaaaactcctccttgaagatttcctgtctcagagtcccagagaggtagaaaggaggaatttctgctggacttcatctgggcagaggaaggatggaatgaaggtagaaaaggcagaattacagctgagcggggacaacaaagagttcttctctgggaaaagttttgtcttagaacaaggatggaaaatggggacaacaaaggaaaagcaaagngtgacccttgggtttggacagcccagaggcccagctccccagtataagccatacaggccaaggacccacaggagagtggattanagcacaagtntggcctcactgagtggacaagagctgatgggcctcatcagggtgacattcaccccagggc

SEQ ID NO: 2696 - DNA, 185 bp, Homo sapiens
  misc_feature 164: n = A,T,C or G
actacagtagctttaagtttgttagacacttaaactctttccgcttgatccaaaaattctttactcagtcacacaacaaatgaggtaatatttgtatgtaagtttcaccttttgtcatttttttctcttttggaaaaatgaaagaaaaaagtgtatatgctttncttctccctggaaatatgcaa

SEQ ID NO: 2697 - DNA, 402 bp, Homo sapiens
actgaatctttgatgttttttgtcattgttctcaagtgcaatataacaatgtaaccaaatctagataatttcaaagttgtcattaatttagtaagcctaatataaacaaatatttgtattatttttgttagcaggaaagagtgattaagtgaggttatttacccctaaatggtccattctgcattgtatttcaggctggaaatgaattattctttaccagttttgaaacactttgaaatatcctaaggtaacttggaagctgtgtagtatatcaaattaatttgctacctaataacatagaaagtaaatatctttgtggtcacccacattgggtgagacagaaaatgaatctgttctaaaatttgtaatttgctaacttgatttgagttagtgaaaactggt

SEQ ID NO: 2698 - DNA, 459 bp, Homo sapiens
acttatttcaacaattcttagagatgctagctagtgttgaagctaaaaatagctttatttatgctgaattgtgatttttttatgccaaattttttttagttctaatcattgatgatagcttggaaataaataattatgccatggcatttgacagttcattattcctataagaattaaattgagtttagagagaatggtggtgttgagctgattattaacagttactgaaatcaaatatttatttgttacattattccatttgtattttaggtttccttttacattctttttatatgcattctgacattacatattttttaagactatggaaataatttaaagatttaagctctggtggatgattatctgctaagtaagtctgaaaatgtaatattttgataatactgtaatatacctgtcacacaaatgcttttctaatgttttaaccttgagtattgc

SEQ ID NO: 2699 - DNA, 431 bp, Homo sapiens
  misc_feature 194, 203, 208, 218, 250, 263, 294, 299, 307, 313, 332, 344,424: n = A,T,C or G
acatacgtgtatatatgtgaacagtgagatggccgtttctgacttgtagagaaattttaataaacctggtttcgtaaaaaaaaaaaaaaaaaaaaaaaaaaaaaaaaaaaaaagcttgtacaaaaacaatgccatattggtatatgacataacaggaaacagtattgtatgatatatttataaatgctataaanaaatattgngtttnatgcattcanaaatgattgttaaaattctcccaactggttcnacctttgcagatncccataacctatgttgagccttgcttaccancaaanaatatttntaatgnggatatctaattctaaagnctgttccattanaagcaattggcacatctttctatactttatatacttttctccagtaatacatgtttactttaaaaattgttgcagtgaanaaaaacc

SEQ ID NO: 2700 - DNA, 412 bp, Homo sapiens
  misc_feature 400: n = A,T,C or G
acatttgaacacacggctgtgttaaagatgctgctaatgtcagtcactgggtgcactaaaggatctcttattttatgtaaaacgttgggattgacaagatagatctgatactctgttaagttaccctctgaagctacttcttgtgaaatactaatgacagcatcatcctgccaagcgaaagaggcaggcataagcaaggacaaattaaaagggggtaagagccttatcatgatgaggagtcttgttttgacatcttgggaaaagctgtccatagtgtgaagtcgtcaatttctcaccatggtttgcagtttgcctgtctctagttaggtgaagtctctgagtggcacacaccttaggcctgagggttttccctttaaattttcattgagttgtccatctncagcatataggg

SEQ ID NO: 2701 - DNA, 233 bp, Homo sapiens
tagaaatatctttctcttacctgttatttatcaatttttcccagtatttttatacggaaaaaattgtattgaaaacacttagtatgcagttgataagaggaatttggtataattatggtgggtgattattttttatactgtatgtgccaaagctttactactgtggaaagacaactgttttaataaaagatttacattcaaaaaaaaaaaaaaaaaaaaaaaaaagcttgtac

SEQ ID NO: 2702 - DNA, 616 bp, Homo sapiens
gcagagtctacttcagaagcggaggcactgggagtccggtttgggattgccaggctgtggttgtgagtctgagcttgtgagcggctgtggcgccccaactcttcgccagcatatcatcccggcaggcgataaactacattcagttgagtctgcaagactgggaggaactggggtgataagaaatctattcactgtcaaggtttattgaagtcaaaatgtccaaaaaaatcagtggcggttctgtggtagagatgcaaggagatgaaatgacacgaatcatttgggaattgattaaagagaaactcatttttccctacgtggaattggatctacatagctatgatttaggcatagagaatcgtgatgccaccaacgaccaagtcaccaaggatgctgcagaagctataaagaagcataatgttggcgtcaaatgtgccactatcactcctgatgagaagagggttgaggagttcaagttgaaacaaatgtggaaatcaccaaatggcaccatacgaaatattctgggtggcacggtcttcagaaaagccattatctgcaaaaatatcccccggcttgtgagtggatgggtaaaacctatcatcataggtcgtcatgc

SEQ ID NO: 2703 - DNA, 410 bp, Homo sapiens
gtttataatcagaaactctggtccttctgtctggtggcacttagagtcttttgtgccataatgcagcagtatggagggaggattttatggagaaatggggatagtcttcatgaccacaaataaataaaggaaaactaagctgcattgtgggttttgaaaaggttattatacttcttaacaattctttttttcagggacttttctagctgtatgactgttacttgaccttctttgaaaagcattcccaaaatgctctattttagatagattaacattaaccaacataattttttttagatcgagtcagcataaatttctaagtcagcctctagtcgtggttcatctctttcacctgcattttatttggtgtttgtctgaagaaaggaaagaggaaagcaaatacgaattgt

SEQ ID NO: 2704 - DNA, 144 bp, Homo sapiens
acactcccacgaccacggcatggtctctttcatatggctcaagggtcaactgctcctgcggcttcatgttctcctgttgcatctttttcacttcggaggcaaacacggcctcggctgaggctgtggagtcaatgcagttggcct

SEQ ID NO: 2705 - DNA, 507 bp, Homo sapiens
agaatagtggggagggaaaaactcctccttgaagatttcctgtctcagagtcccagagaggtagaaaggaggaatttctgctggacttcatctgggcagaggaaggatggaatgaaggtagaaaaggcagaattacagctgagcggggacaacaaagagttcttctctgggaaaagttttgtcttagagcaaggatggaaaatggggacaacaaaggaaaagcaaagtgtgacccttgggtttggacagcccagaggcccagctccccagtataagccatacaggccagggacccacaggagagtggattagagcacaagtctggcctcactgagtggacaagagctgatgggcctcatcagggtgacattcaccccagggcagcctgaccactcttggcccctcaggcattatcccatttggaatgtgaatgtggtggcaaagtgggcagaggaccccacctgggaacctttttccctcagttagtggggagactagcacctaggt

SEQ ID NO: 2706 - DNA, 440 bp, Homo sapiens
ggcttctgtgctgtgtagggatttaaccaacttcagtggttcagggagctcaaactatatgtaaaacaagtttagaatgtatgctatctagcccgttatctctgatccttctctaaaaccatttgaaatagcttcattgatcaacatttcataaatgcatctgtggtagaggtagaaagcagcacctttcctaattggcaaatgatcagactaatgtgtgctaatgtttttcttccatgctttcagtcagattcaactattttatcctccacagttgcttaacttggtgttggaggagggtttaagcattaagataggaagcaggaaatttgattgctctaaatttagaaattatatccctaaaaattaaaacatgaatactgggtggtaatgataattgaggcaaatgtatttattttggtgacattttgcatatatga

SEQ ID NO: 2707 - DNA, 208 bp, Homo sapiens
gctgaactgctctacaagcgcatcatccgtcctttcttcctgaagcacgagtcccagatggacagtgtggtcaaggaccttaaagacaaggccaaagagactgcagatgccatcactaaagaagcgaagaaagctaccgtgaatttactgggtgaagaaaagaagagcacctaaaccagactggatggaaacttcctgccctctctgt

SEQ ID NO: 2708 - DNA, 312 bp, Homo sapiens
ttcctataagaattaaattgagtttagagagaatggtggtgttgagctgattattaacagttactgaaatcaaatatttatttgttacattattccatttgtattttaggtttccttttacattctttttatatgcattctgacattacatattttttaagactatggaaataatttaaagatttaagctctggtggatgattatctgctaagtaagtctgaaaatgtaatattttgataatactgtaatatacctgtcacacaaatgcttttctaatgttttaaccttgagtattgcagttgctgctttgt

SEQ ID NO: 2709 - DNA, 368 bp, Homo sapiens
  misc_feature 214, 226, 230, 235, 293, 308, 322, 324, 335, 343: n = A,T,C or G
ggtggatcactcggctcgtgcgtcgatgaagaacgcagctagctgcgagaattaatgtgaattgcaggacacattgatcatcgacacttcgaacgcacttgcggccccgggttcctcccggggctacgcctgtctgagcgtcgcttgccgaccaaaaaaaaaaaaaaaaaaaaaaagcttgtacaagctttttttttttttttttttttttttnattttttttttncagnatatnaaaattcatttatttagtgaaaccctacattaaagcgtcccaacacaaagcaaattcnaacataacaactggngattggctcatttnanaggctcacatnatcagtgngttaactaacatacaataggactgt

SEQ ID NO: 2710 - DNA, 518 bp, Homo sapiens
gcgcagtgctttcattaggattttacagaaaacttagaagatggccttcacatggctagtttccttactgttcattcagcagacatttactgagggcttactatgtcctaggctctgatatccatacatggtaaaacgtaaaggcatgtgcattttggcagggggtgctgcattgacaaggagtggtctcggtgacagttttgggaagtcagtttagaacggtattggacacactgttccatccctgaattacacacaggcctcaatgctaacttgagtgggcttttggtccagcaggcctgggctccaggggcagtcactcagcgtcctgcctcaagagtggttgtgtcatgaaatcttggccctctttgactgatagctacaattatttgaagagtgtggtttttagaacaaaactaaatctgttttgaagctctgctgttttatacctgctgtgtgatcttgctcaagtttttatttttatttttttctgtataagggatttattttatttttat

SEQ ID NO: 2711 - DNA, 466 bp, Homo sapiens
acaaatctggggtttggccattaaaagttatttacaacagtgggagaaaaaaagacaagaagttgtttcacattacagacctccccccaccccaaagcctaatacttgcttaccaagtcaaaaaagagacacagttgattcacaggctggaggtttgaacttgagtaagacatttataaaaacctagacggggcagtgtcctccccagcccaggtgccactaggcacagcacaagagactaaaaacaacaggggaaggctggacactcaaggtttgggagtataagcaccccacttctggctcagggatttggggagtagggtaaacaaaacctacttggaaaagaattggggaagaaaaccaacaactgccttatgcaggggtggggacagggaaggaggtagggccagggacaggagcatttcacatcactaacctaacttgggaagctgtaagggaccatctt

SEQ ID NO: 2712 - DNA, 442 bp, Homo sapiens
acagtggtattttttaatacaaaataaacatctgttttatggaaaaaactatacttcatatctacacagacagctcatcttttccaaacaatagccaaaattaaaattaactacaaaatctccaaaacaggggaaactgctttagattaaacgattccaggaaaaatggacccgtaacacattacaagggtgatctaaagattgtggctggaattactgttaaagtttttttttcccaatgcattaaattgtattttggggagatttttctcacttcggcatgatctcagatcatagatgagcaaactaacattaaaatatttacagttaacttgttgctctaaaaataaaacttaactgtttgcctcaatttatttttaaaattcacttacgtatatggaatgtgcttttactcttcttaaaaaagcagctttcatatcac

SEQ ID NO: 2713 - DNA, 359 bp, Homo sapiens
ctaaagccagtggcagtgtatgctcatacttggacagttagggaagggtttgccaagttttaagagaagatgtgatttattttgaaatttgtttctgttttgtttttaaatcaaactgtaaaacttaaaactgaaaaattttattggtaggatttatatctaagtttggttagccttagtttctcagacttgttgtctattatctgtaggtggaagaaatttaggaagcgaaatattacagtagtgcattggtgggtctcaatccttaacatatttgcacaattttatagcacaaactttaaattcaagctgctttggacaactgacaatatgattttaaatttgaagatgggatgtgt

SEQ ID NO: 2714 - DNA, 87 bp, Homo sapiens
acaacttatagaaaaggtaaaggaaaccccaacatgcatgcactgccttggtgaccagggaagtcaccccacggctatggggaaatt

SEQ ID NO: 2715 - DNA, 364 bp, Homo sapiens
accccaatctgaagtcagtaaatgaactaatctacaagcgtggttatggcaaaatcaataagaagcgaattgctttgacagataacgctttgattgctcgatctcttggtaaatacggcatcatctgcatggaggatttgattcatgagatctatactgttggaaaacgcttcaaagaggcaaataacttcctgtggcccttcaaattgtcttctccacgaggtggaatgaagaaaaagaccacccattttgtagaaggtggagatgctggcaacagggaggaccagatcaacaggcttattagaagaatgaactaaggtgtctaccatgattatttttctaagctggttggttaataaacagt

SEQ ID NO: 2716 - DNA, 392 bp, Homo sapiens
  misc_feature 61, 103, 148, 156, 188, 192, 201, 244, 316, 365: n = A,T,C or G
acaagctttttttttttttttttttttttttttttttacaggaaggaattccatttattgnggatgcattttcacaatatatgtttattggagcgatccattntcagtgaaaagtatcaagtgtttataaaatttttaggaatggcanattcacanaacatgctagtcagcttgcagttttacctcgngaanataacaganaattatagtcaaaccagtaaacaaggaatttacttttcaaaanattaaatccaaactgaacaaaattctaccctaaaacttactccatccaaatattggaataaaagtcagcagngatacattctcttctgaactttaaattttctaaaaaaatatgtaatagngatcaggaggagctcttgttcaaaagt

SEQ ID NO: 2717 - DNA, 473 bp, Homo sapiens; identical to SEQ ID NO: 2542

SEQ ID NO: 2718 - DNA, 529 bp, Homo sapiens
  misc_feature 521: n = A,T,C or G
accactccagttgtcttcacaatttaatgctacagaaacctaaatgtttctacttcagctacgaaatcattcaattggcaggcaaaacatttttattacctatttataaaaacatgagaaagggaggaaaaataatagaatgtataaactcatgctatcataattctaatgtctagctataaaggcatatggttgtaacaattgctatctaaaattttttattagctgcagtagctgcattccattttcattaccattttttaaagtctttttgcttggtcatctaaagacgtttttcaaatttcaaaagatcagctattattgtcctccttgtgcccctaaggaattaataaaatgcacattcatttccttctttctaaatgttccagttaaaaacgaaacaatgcaaaaatggcaaacattttcttggaccatttttttcactgtaacaacaaaaaatgtgcaaggtaaatagaactcaagttttgttttattttttgtctgtttgtattttaataagnccgtccag

SEQ ID NO: 2719 - DNA, 161 bp, Homo sapiens
  misc_feature 1, 4, 103, 107, 114, 122, 127, 155, 156: n = A,T,C or G
ncgngactgatttaatttgatttacagagcggagtgtgttcttataaaaatatttaatgacattggttcttgtcttttgatcttttatttctgaaacactcanacancttacanagtgctgngtagntaatagtgacccaacttgtttgctaaannattat

SEQ ID NO: 2720 - DNA, 355 bp, Homo sapiens
acagaatgctatttcacttgagcaagatgatgtaatggaaagggtgttggcactggtgtctggagacctggatttgagtcttggtgctatcaatcaccgtctgtgtttgagcaaggcatttggctgctgtaagcttattgcttcatctgtaagcggtggtttgtaattcctgatcttcccacctcacagtgatgttgtggggatccagtgagatagaatacatgtaagtgtggttttgtaatttaaaaagtgctatactaagggaaagaattgaggaattaactgcatacgttttggtgttgcttttcaaatgtttgaaaataaaaaaaatgttaagaaatgggtttcttgcctt

SEQ ID NO: 2721 - DNA, 179 bp, Homo sapiens
  misc_feature 3, 32, 150, 167, 177: n = A,T,C or G
ctncttgccgggtcagccctgacaaaggtcanctagccccttgaggacatcagctttggcctcagggtcctaatggcagcagaaccactgacagagctagaggagtccattgagaccgtggtcaccaccttcttcacctttgcgaggcangagggccggaaggatancctcaacgtnaa

SEQ ID NO: 2722 - DNA, 258 bp, Homo sapiens
acatgtcaaatgccttctgtcccagcacagctcccgtggttccattcaccagggcgatgtttaggcctctgcccacattgtttttcacaggactcatgatcatgcggtcttcaaagcacatagtagggcccacgacgttggcggccccactgcagattttaaacgcaaagtagttggctgggcagggcttgatgaggccacacttgtcaagctttttttttttttttttttttttttttttttttttttttttttttg

SEQ ID NO: 2723 - DNA, 291 bp, Homo sapiens
gtggttatgaccgctactcaggaggaaattacagagacaattatgacaactgaaatgagacatgcacataatataggtgagacttggatatcggcattgagtgaacctgtttgtcacactctgtcatgaccctctcaccttttctggcaagactgctctgcatttctgctgccctcatacctcacccagccaacctaccaaacattcctagctaggccttccttgctctcaggtgcatatcagagcaagtttgctagggggtgggatctgaaaacccatctcctataatct

SEQ ID NO: 2724 - DNA, 265 bp, Homo sapiens
  misc_feature 243, 261: n = A,T,C or G
acaccagctaaaggacttgttggaccagattctgatgttggacccagctaaatgaattagcatcaaccaggccctacagcacgccttcatccaggaaaaaatttaaacaagatgaagaaactccaagggtttgagtaaatacaaagactgaagaaatttcacagcagtttattaatgtatataaacttataaatatttctccagcaaatttgaggaagcatgatatatttgaattaacaccangggtgatatttcttttanagat

SEQ ID NO: 2725 - DNA, 512 bp, Homo sapiens
taaaaatatatgagtttgggggtaaggggtgggatagccaagcaaaatcagtaattattttaaaatgaacatatgtatttttattaacttttagttaaatacagattttacaacgaggtcagcataagcctaaatctatatagagggctaactcaggcattgtcttgtttatttgtagactggattaaaaacaacctgtcctgttttgtcagttcccagcttcttcgtttagaataaattagaccaaaagaagaaacgtacttgtctctgtatacccgcagaatgaagttactgttgttaaaactggattttttcattttactaggttccgaagagtccagatgcttggtggatgttcaatacgtgatttttttttaattgaatgtgttcatttaaaatcctccttaacatttctagaaagacttctttcaataaataatggaatcttagaggaaaagtggttttttaaaagctagggaacctcctccactaaaagtaaccattggaaacct

SEQ ID NO: 2726 - DNA, 171 bp, Homo sapiens
  misc_feature 156: n = A,T,C or G
acactgaggacatagcaaatatgcaataaatacttattaagctgaagtgaactaacaaaaaccattaattacaccatttctaacaaccaaaccagctattgcttttcagtgttttggtgatacgttggagtatgaagtcatattcaaattggttanatccttggaagaaat

SEQ ID NO: 2727 - DNA, 227 bp, Homo sapiens
  misc_feature 221, 222: n = A,T,C or G
accttattatcctacatcgcaaatttcaacagctacattatatttccttctgacacttggaaggtattgaaatttctagaaatgtatccttctcacaaagtagagaccaagagaaaaactcattgattgggtttctacttctttcaaggactcaggaaatttcactttgaactgaggccaagtgagctgttaagataacccacacttaaactaaaggctannaatat

SEQ ID NO: 2728 - DNA, 307 bp, Homo sapiens
  misc_feature 264, 276, 290, 295: n = A,T,C or G
actggctcctctgtggtgtctgcctgttgcgtgacactctccttgcagttcttgagttgcggcagaacatcgcgatgggaaccgatggtgggtggggctgcagagtgccccatcggtcaccttgtttctcaactacctcgcatcattgcagatgctagcgcgttgcctgtcgctttcccttggatacctagaccgttataaagtgtgccacatggacttaccgagcatggagagaggattttagctaggatttgaacacttggngctgggaacctnagggtattgcttgncactnagccatgaaacc

SEQ ID NO: 2729 - DNA, 397 bp, Homo sapiens
gcatgcaccaccatgcctggctaatttcagaataatattttcatacacataaaatatgtaggattacaaagtaagctagttatatttatatacagttgtcaaaatatttttaaaatgtataacgtgatactatgtgtataggtttctttattaacatattgaataaaaagatcgagggtaggcctattaaacaatggtaaactgaagagagatgagtgtaaacaatattttaagatacctgtggcaaactgtaaagggatatgaaaaactctgtaatttctattggcactgctgatacaactgcactttgctacctttgttcataaccaaggaaatagaaatgactgaaaataaagttgtattctattccaaaaaaaaaaaaaaaaaaaaaaaaagc

SEQ ID NO: 2730 - DNA, 318 bp, Homo sapiens
  misc_feature 195: n = A,T,C or G
acagcaaagcgacccttggtgtcatagatcagacggaaattctctcccgtcttgtcaatgctgatgacatccatgaatccagcagggtaggttatatcagttcggaccttgccatcgattttaatgaaccgctgcatgcaaatcttctttacttcatctcctgtcagggcatacttaagtctgttcctcaggaanatgatgagggggagacactctctcaacttgtggggaccggtggatggacgaggagcaaacacaccggtcaatttatccagcatccaatgctttggagctgccacccgcttcagatgcttcttg

SEQ ID NO: 2731 - DNA, 441 bp, Homo sapiens
  misc_feature 22, 35, 112, 138, 157, 225, 234, 293, 372, 415, 430: n = A,T,C or G
accttccacattgagtattcanaaagaagtgatcngaactctgaccattctttatggatacattaagtcaaatataagagtctgactacttgacacactggctcggtgagtnctgctttttctttttaatataaattnattatgttggtaaatttancttttggcttttcactttgctctcatgatataagaaaatgtaggttttctctttcagtttgaattttnctattcagnaaaacaacatgctagaaaacaaacttttggaaaggcattgtaactattttttcaaatanagccataataacaagtcttgtcttaccctaaagtcaaatgctgaagattctttactgctgtcatcagcatctacaagtngcatattttggatggtgtttgtgtgctatttcaaagtaactangaaaaaataatcctngcaacacaggt

SEQ ID NO: 2732 - DNA, 309 bp, Homo sapiens
accattttaaattcacataaaaggtgaaagctcctggttcagtgccatggcttcatggcattcagtgattagtggtaatggtaaacactggtgtgttttgaagttgaatgtgcgataaaattattagccttaagattggtaagctagcaatgaatgctagggtgggaagctggtgagccagtggccattagataaatacctttcaagtgtgagcttagacgtcaaccctaaaatacttaaccgtaatgctaattgtgatcattatgaatcccttcagtcacattagggggaaagtagttggctataagt

SEQ ID NO: 2733 - DNA, 439 bp, Homo sapiens
  misc_feature 34, 38, 57: n = A,T,C or G
ccgggcaggttttttttttttttttttttttttngagngttgaggattttttattgngttttccacatagataaaaaaataaggctttttgatgaaaagaatccattacaaagtcaaaaatccattacaattataattgaatcagtaacaaaatttagctttaaatgagtcaagtattctgcatttgaaatttaatatcacaaacattcaagattagtgaattttggtaagaaaaaaatactagaagaaaggaaaaggacaccttttcaacagatagtaatttataaaaatttttttaaaagtgctttgggaaaacacacagtatcattacttaagaaaagtcatttaaggaagacttaagtgcttcaagtggagtgtattacagactaaaaaatgttttaaaatttgccaagaaatttaagtgttaaaaatactcttc

SEQ ID NO: 2734 - DNA, 440 bp, Homo sapiens
  misc_feature 402, 408, 435: n = A,T,C or G
acttacacgtaagattttagcctatggtcattttataaagatgactgttaggatttaattcacatttaaagaaaatgagattcgttatattatggtgttttttatgacctataaaatacttacccctacaaatttccataaatgtagtggttagtaaagcttttttcttactgaaaaataatgccaggtaaccaagtattattccttccatcatttatttaggaaaaagttttatgtattagggtaaagtggtagaagttaacctagaatctaataatctccaatcacccattcctgatctaatagtagccatgagaaaaaatctctagaaagaatcatacctctcaaaaaataaaaaataaaacaaaggctgggtgcagtggctcacacctgtaatctcancacttncggaagttgaggtgggcaaatcgcttnaacct

SEQ ID NO: 2735 - DNA, 518 bp, Homo sapiens
actttcctagatgacatatcgagtcaacatgaagccttagctaaaatgaatgattcaggatattaatgagaaattctcacaaatgatatgcatttaggaaatgattttgctttccttaaatagttcgaaggcttgaaaataaacttttttttgcatttcttttagaatgtttggtcattaacaacttttaaccttatcttcctcttctccttagcccttaacagaccgagtccattctatttggaaataacaagaacttgatcagattattaaatcttggaaacctcatttttaccttataaagtgttaagtttcacgtgcatatcctcttacaaatgtagtataaatgttatggatagatataaggaaatattggcatagtataggtaattagtgaaaagacacaacttcacaaaacataataaaagataaacatgaaactataacactacttaaaaaatattttctcccaaattattttaacatttttgactagtttaataatatgaacactgcca

SEQ ID NO: 2736 - DNA, 228 bp, Homo sapiens
  misc_feature 123, 134, 194: n = A,T,C or G
acaatcacaaggttttaaactgaatgtatgggacattggtggacagaggaaaatcagaccatactggaagaattattttgaaaatatcgatattcttatatatgtaatcgacagtgcagactnaaaaagatttnaagagacgggtcaggaactagcggaattactggaggaagaaaaactaagttgtgtgccantgctcatctttgctaataagcaggatttgctcac

SEQ ID NO: 2737 - DNA, 528 bp, Homo sapiens
  misc_feature 491: n = A,T,C or G
actacagtagctttaagtttgttagacacttaaactctttccgcttgatccaaaaattctttacttagtcacacaacaaatgaggtaatatttgtatgtaagtttcaccttttgtcatttttttctcttttggaaaaatgaaagaaaaaagtgtatatgctttccttctccctggaaatatgcacaagggatggggtaaaacagtattgaagacctcatggctttctttgcaatttaaaacatttgcaaatggataaccaactaattccacttgaaaagataaaacagagaaaaaaagaatcccataacatccactctgagcacaaggggcagagcagcttattagactgattttccttgtgctgttcttgcaagagatttgctgataaatgtcaactacttgctctcaaacactttccgtatgaagcctaaatttccaggcagaacagagttaataaataatctgtatttacaatcttacagtcacgaanactctcaacaaagatgacatggatagtctttacgctt

SEQ ID NO: 2738 - DNA, 281 bp, Homo sapiens
  misc_feature 201, 213, 258, 271: n = A,T,C or G
actcctccaggggaatgtgctgcttgggattctcatcttttagtgcactgtcattggccccaaagaaaattgtaactgctactgggatgtccaaactgtttcctttcctgattaatcttggaaggataattttggcccacctggtattgtaacctgaaaatccacgattcagaacatcacattttctgaccaccctgtcanccagcgatgctncccatccaccctgctggaaggaaaactgggtgatggagtccccgnagagcaacaagcnaggccagagc

SEQ ID NO: 2739 - DNA, 470 bp, Homo sapiens
  misc_feature 465: n = A,T,C or G
acatactattctgcacttttccaccaaaagcagtggtgtgttatgcttgttatataaaaaaaagttatatcctgtggcaggaaaaaccctttctctttcacttttactaaacaactggagaaaatgttcaagtctgtataaagttgcctataagctggaaagtgaacttgttcaatctccatttacattttagtgcattttttgacaattgtcacatttttaacaaaagtaagaaaatgcatatagcactaaagagtgtttcatcaaatgcttaagggattaaaaaatatggagcagagaacaaaatcattgtgaatggatgaactgttgtaaaatgaaaaaagtccaggcaaagttgttacaagtcttttgtcactttgatgagtcacagaaaatgaactttggatacctgtccactttaagggttttttccttaatcttttgcatgtaaacatagtgctaacntcagt

SEQ ID NO: 2740 - DNA, 473 bp, Homo sapiens
accaaaccattttatgagttttctgttagcttgctttaaaaattattactgtaagaaatagttttataaaaaattatatttttattcagtaatttaattttgtaaatgccaaatgaaaaacgttttttgctgctatggtcttagcctgtagacatgctgctagtatcagaggggcagtagagcttggacagaaagaaaagaaacttggtgttaggtaattgactatgcactagtatttcagactttttaattttatatatatatacattttttttccttctgcaatacatttgaaaacttgtttgggagactctgcattttttattgtggtttttttgttattgttggtttatacaagcatgcgttgcacttcttttttgggagatgtgtgttgttgatgttctatgttttgttttgagtgtagcctgactgttttataatttgggagttctgcatttgatccgcatcccctg

SEQ ID NO: 2741 - DNA, 414 bp, Homo sapiens
acctatgagcagcagtgcccgggggcgctggccacctccctgtgcaccggataccctcccccgcacccacaggggttcacttacagtttccccaccttgcagcagcagtgaggctcagagtcacccacactccatacatccctctgctcataccctgcctgtagtgtggctccgtctacctacaaagccccacaaagtggacaacgctgggatgacaaaacctttcctcttagatattatatactttgcaaggcttggaaataagctactgcattggtcttaagctagtccggcatgtgaagaaacaagaatttgcccagaagaggactgtggagaaacctctgaggcctccttccagagtaaggcccgctcacttgaccagattcctcatgatgttcagggcggatcctctgt

SEQ ID NO: 2742 - DNA, 388 bp, Homo sapiens
acatgaaagcaggggactgtttggaaaagaatcagaatctcaagatctatttttcttaaatgggaaagctctgaaacccagatctccgttctaccatcatcctgatcctttagttatggggcaataaactcaagtgcaatgagtaaagtgccagccatggatacaaaaacaaaaaataaaacaaaacaaccaaccaaaataactctggtcttagggtaatagaagacatacaggaaaggactgtttatagaacacctgaggttctcaagaaattactattcaatggttctgtttttgcttacattaaaaatcagactgaagattcaaagatcttaactattaaaggatgaaaggaatttgacagtgctttgaacagtgataaaatggt

SEQ ID NO: 2743 - DNA, 59 bp, Homo sapiens
cttatttcaacaattcttagagatgctagctagtgttgaagctaaattagctttactta

SEQ ID NO: 2744 - DNA, 102 bp, Homo sapiens
acctcagccccaggtggtggcccgggaaccctggatgacagtgccaccatttgccgtgtctgccagaagccaggcgatctggttatgtgcaaccagtgtgag

SEQ ID NO: 2745 - DNA, 271 bp, Homo sapiens
  misc_feature 31, 121, 133, 144, 159, 186, 201, 210, 221, 235, 236, 248,254: n = A,T,C or G
acattctagttggaatcgtttactctgctanaatttaggtgtgagattttttgtttcccaggtatagcaggcttatgtttggtggcattaaattggtttctttaaaatgctttggtggcanttttgtaaacanattgcttctanattgttacaaaccangcctaagacacatctgtgaatacttanatttgtagcttaatnacattctanacttgtgagtngaatgacaaagcanntgaacaaaaatnatggcntttaagaatttaacatg

SEQ ID NO: 2746 - DNA, 511 bp, Homo sapiens
acatgaattagaagcgtgcatctaggattatggccaaactgttttaaaaatgcagaaatgtaaaattacatcttgaaaatatgaagagatggtctacacacttcaaaaatcaaatgttgcttataccagagatgtatgacaatcacgggattcaagtgacaagcagtaagatctcaaaaattaatactggtcaaagataatgggaatatttttgcatttcactgaaaatacattgactactagaatacgaaatctagcaggaactcagggaaaaaaattacaaaatctaaagccaattacttaatatttcttattacctaaacaacagcatgacattaacagaaaactgcacctgcatttcaattgccaatctcacgttaattaagttctccaaaaatgaaatgcaaccaaaacgggttcaaactccaaatgaaagtctgcaaggctcagattaaaacatggaatgtttcagatgaaagtaataaaaacactattggttttgttctttatt

SEQ ID NO: 2747 - DNA, 473 bp, Homo sapiens; identical to SEQ ID NO: 175

SEQ ID NO: 2748 - DNA, 167 bp, Homo sapiens
acctgtgggtttattacctatgggtttatatcctcaaatacgacattctagtcaaagtcttggtaatataaccaatgttttcaaatgtattctgttatacaaagagcagatttttattgaacttgtgcaataactatattaccatacaatataaatattcatgaata

SEQ ID NO: 2749 - DNA, 544 bp, Homo sapiens
accgcatcctagccgccgactcacacaaggcagagttgccatggagaaaattccagtgtcagcattcttgctccttgtggccctctcctacactctggccagagataccacagtcaaacctggagccaaaaaggacacaaaggactctcgacccaaactgccccagaccctctccagaggttggggtgaccaactcatctggactcagacatatgaagaagctctatataaatccaagacaagcaacaaacccttgatgattattcatcacttggatgagtgcccacacagtcaagctttaaagaaagtgtttgctgaaaataaagaaatccagaaattggcagagcagtttgtcctcctcaatctggtttatgaaacaactgacaaacacctttctcctgatggccagtatgtccccaggattatgtttgttgacccatctctgacagttagagccgatatcactggaagatattcaaaccgtctctatgcttacgaacctgcagatacagctctgttgcttgacaacatgaagaaagctctc

SEQ ID NO: 2750 - DNA, 231 bp, Homo sapiens
  misc_feature 122: n = A,T,C or G
acagtgcctaacagagtttcatgcagccctgggggcctacgtctgactcctctccaatcccacaccatcaggaagaaggtgcctgtcggggctcacttgaagcctgtcagggatgctttgtntctaacacaacgccaacagaagcacatttgtcttccagaacaccgtgccttaaaaatgctttaaaatctgaacttttaaagacagacttaataatgtggcatattttgt

SEQ ID NO: 2751 - DNA, 337 bp, Homo sapiens
aaaaaaaaaaaaatgctgtatctaaatgaatctgtgtaattgggcccagatgtgggtttgctcagtattagtagacaaggtctttgttcagacgattaggtgcctaactggcaaatgccttagtttcttaaaacgtattttctgatgtggctttacatttcaaaagtggacttgattcaacctgagaaaactgattaaaaaattagtttaaatttgccagcagggaagtaaaataattatgggaagagtgtcttaagcctaatattaaatcagttttgttaaggggaaaactcaatagttctgttacttaggctgttagatccaagttgatttttgt

SEQ ID NO: 2752 - DNA, 579 bp, Homo sapiens
  misc_feature 490: n = A,T,C or G
actcagaactgtgtaaaagttaaccaccaaaaccatgttttaaagaaaaaagtttaaatgtaagactaatgtcttggggactttactaaatgtatttctaaaaaaacccttctcaaatgtagaagtattggcaattctaatttaaaaattttaaatttttaattattggaaatttaagtagcaatagtttcaagagctaagaatcagattgctttttaaaacagaattttttttttttcctgagggactcatacttgacaactccagttaaacataatactccacccaaatcccaaatttaaatgcattatgtcaccctggaatagtaaaattataaaatggtatttctaaattataatatatatacataatgcaccattttaactgtcacatttaccagcagaattatgaaatcaaaaacaaattctacattcaagggacaaacgataaatgctctttcattgttttaagagtccattccattctttgntgttttctactcccatattttaaaattatgaccaaaggagcctgaaggccaagtcaatcccatttccctgaacccaactgccagtaggt

SEQ ID NO: 2753 - DNA, 370 bp, Homo sapiens
  misc_feature 302, 329, 366: n = A,T,C or G
acataatcaaaacaactttaacacccgacctatccatgaggagtctggatgattcactctgaaggaaaaggggagagaagagagaatcactgctctgatttgaagtgtgcaaagttcttatctatgtcacttaacactggtataattaatacagaaaggaaaatgaccctcaagaggaaggtttcattgagcagagcgtaagaggaacaataagagggtaggagacacctcctgagaaggtttgcttgtgttcagctgaagattaataggaaacagtgaaaaagcaacgtcctgtgatcagnaactttaaagacaagcttggttctctntttctggcactactgacattcccaccattctagcttncaaa

SEQ ID NO: 2754 - DNA, 302 bp, Homo sapiens
  misc_feature 247, 284, 286, 288: n = A,T,C or G
accaagagtcaaatttgagaacaaaaatgaacagtatggaaaaagcccacaaagaaactgtggaacaacttcaggccaaaaacagagaactactcaaacaggtcgtagcattatcaaagggtaaaaaatttgacaaaagtggaagcatactaacatctccttgagaaagtcatttgtttagcatttcttcttacaatgtaaatttggggaaaaaaaattctgtgaagcccttaaattctgtgtagtngaaaaatatttttgcacaccaaatgaattggtgtgtnancngttcacttttgtaa

SEQ ID NO: 2755 - DNA, 308 bp, Homo sapiens
acggccagggctattggttgaatgagtaggctgatggtttcgataataactagtatggggataaggggtgtaggtgtgccttgtggtaagaagtgggctagggcatttttaatcttagagcgaaagcctataatcactgcgcccgctcataaggggatggtcatggctaggtttatagatagttgggtggttggtgtaaatgagtgaggcaggagtccgaggaggttagttgtggcaataaaaatgattaaggatactagtataagagatcaggttcgtcctttagtgttgtgtatggttatcatttg

SEQ ID NO: 2756 - DNA, 509 bp, Homo sapiens
acagctgactcactttatcttgacacttgacataggcttcgtagtctgcaaagactttaaacctgtcatgataaaatagcatgttgatgatatctttgaagaggtcagactgcttgggagaaaaaaagccattgtcaatttgatcaatgaccagcttcagctctggaagtgcctcatagtattcttttgcctcgtctgtgtcttcacatggcctttcctcctgtgtgagagagaagaaagagagagagggagaagaagagggagagagagagagagagagagagagagagagaatgagaacgtgagctctggtgtctcttcctcttcttatgaagacaccggtcctattggatcagggccacacccttacgacctcttttaatctgaattatctccttaaaggccctgtctccaaatacagtcgctttgggggttagggcttgcaacatatcaattttggtggggatacaattcaattcataacagggattgtatgcacaaaaccacag

SEQ ID NO: 2757 - DNA, 285 bp, Homo sapiens
  misc_feature 35, 44, 132: n = A,T,C or G
gtttataatcagaaactctggtccttctgtctggnggcacttanagtcttttgtgccataatgcagcagtatggagggaggattttatggagaaatggggatagtcttcatgaccacaaataaataaagganaactaagctgcattgtgggttttgaaaaggttattatacttcttaacaattctttttttcacggacttttctagctgtatgactgttacttgaccttctttgaaaagcattcccaaaatgctctattttagatagattaacattaaccaacat

SEQ ID NO: 2758 - DNA, 288 bp, Homo sapiens
gcattagcaccataacatgcgtctttaaagccttcccaaatattagtaatcttgaccagcaatgacaagaaaaaagaggagcacctttacaagcagttgatatccaatattaaaataattgtggctttaaaaatatttctttaaattcttgcattacacttttctttttaaaccaatctcctggaagattggtttaaaaagaaaagtgtaatgcaagaatttaaaccaatcttccaggagattaatcaatgaaatttataagttttatcaacgtataaaatttttttc

SEQ ID NO: 2759 - DNA, 375 bp, Homo sapiens
ttgagagcttctcagactatccacctttgggtcgctttgctgttcgtgatatgagacagacagttgcggtgggtgtcatcaaagcagtggacaagaaggctgctggagctggcaaggtcaccaagtctgcccagaaagctcagaaggctaaatgaatattatccctaatacctgccaccccactcttaatcagtggtggaagaacggtctcagaactgtttgtttcaattggccatttaagtttagtagtaaaagactggttaatgataacaatgcatcgtaaaaccttcagaaggaaaggagaatgttttgtggaccactttggttttcttttttgcgtgtggcagttttaagttattagtttttaaaatcagt

SEQ ID NO: 2760 - DNA, 422 bp, Homo sapiens
acaagggcatatttaacggattctcagttacacttaaagaggatggtgttcgtggtttggctaaaggatgggctccgactttccttggctactccatgcagggactctgcaagtttggcttttatgaagtctttaaagtcttgtatagcaatatgcttggagaggagaatacttatctctggcgcacatcactatatttggctgcctctgccagtgctgaattctttgctgacattgccctggctcctatggaagctgctaaggttcgaattcaaacccagccaggttatgccagcactttgagggatgcagctcccaaaatgtataaggaagaaggcctaaaagcattctacaagggggttgcttctctctggatgagacagataccatacaccatgatgaagttcgcctgctttgaacgt

SEQ ID NO: 2761 - DNA, 409 bp, Homo sapiens
gtcaaggatgttcgtcgtggcaacgttgctggtgacagcaaaaatgacccaccaatggaagcagctggcttcactgctcaggtgattatcctgaaccatccaggccaaataagcgccggctatgcccctgtattggattgccacacggctcacattgcatgcaagtttgctgagctgaaggaaaagattgatcgccgttctggtaaaaagctggaagatggccctaaattcttgaagtctggtgatgctgccattgttgatatggttcctggcaagcccatgtgtgttgagagcttctcagactatccacctttgggtcgctttgctgttcgtgatatgagacagacagttgcggtgggtgtcatcaaagcagtggacaagaaggctgctggagctggcaaggtcacca

SEQ ID NO: 2762 - DNA, 313 bp, Homo sapiens
  misc_feature 273, 287, 294, 295, 303: n = A,T,C or G
acaactaagaagctttatcaacattttctaaatgttaggagtagtattaagatctgtcagacaagtatgccaggtcacagtttaaaggatattgatataatgccatattgtgcattaaataaaaacaagagaaaaatataataaacttgagaaactcactaaatttgaccaataggctttattttaaccagtggtattgtctgacatcctatacggcataactgattacagccaagttcatgaatacaaataaaatagcaatttccctcattntctcttttgttttntgttcanngaaatcangagatgggag

SEQ ID NO: 2763 - DNA, 485 bp, Homo sapiens
acagtggtccttttcagagttggacttctagactcacctgttctcactccctgttttaattcaacccagccatgcaatgccaaataatagaattgctccctaccagctgaacagggaggagtctgtgcagtttctgacacttgttgttgaacatggctaaatacaatgggtatcgctgagactaagttgtagaaattaacaaatgtgctgcttggttaaaatggctacactcatctgactcattctttattctattttagttggtttgtatcttgcctaaggtgcgtagtccaactcttggtattaccctcctaatagtcatactagtagtcatactccctggtgtagtgtattctctaaaagctttaaatgtctgcatgcagccagccatcaaatagtgaatggtctctctttggctggaattacaaaactcagagaaatgtgtcatcaggagaacatcataacccatggaggataaaagcccc

SEQ ID NO: 2764 - DNA, 542 bp, Homo sapiens
  misc_feature 445, 459: n = A,T,C or G
acgaaaaaatagctgggtgtggtggcgggcacctgtaatcccagctacttggaaggctgaggcaggataattgtttggacctgggaggcagaggttgcagtgagctgagatcgcgccactgcactccagcctgagtgacagagcgagagtccatctcaaaaaaataaaaaaaaaaaaaaaaaaaaaggtaaactgatgcagaaagagaaaaacaaatgcactatctcatttataagtaagagctaaataatactccagcctgggcgacagagcaagactccacctcaaaaaagaaatatttagcaaatattaaaggacaagagggaatatctgtttaaaaaattataatgcacgttagatgaaaagtaataggatgagatggttgttgctgaaatagcacttgctatataaattcaaacattccttttcaaattcagcttctcanaggtttgacttcanatgcttgagcactttcaacattatctttgcctttatccttctttatgcggataaacacaactgctaaaattataccaatcacc

SEQ ID NO: 2765 - DNA, 517 bp, Homo sapiens
acagattgggcggaatgtggagaaggttggccacagtccagagccaggagcccatggaacaacttggaaggtgactcaggtgaggctgtcaatgagggaatcccgcatgctggtggcaatggtgctaggctgggcttcattcagcttgaagacactctccaccactgacagctctgtgctggttgtgtccaggccacagaaggcacaccagtcattcaccaccatcccagcagcaatcacctcactgcctcggttcacagtccccgccacaagggggacttgaagaagagaggacagctcatcctggtcttcaattgaagtcttgggatgcaccagccctccctgattgctgaagacacagtagcttcctactagcacctggtcggccactgtctgtctgaagacttccaccttgagcacatctgccagaatttcttctgtctccctgtccaagtctgggtggaccaaggccacgtagtcattgcaggtggtgacattgcccaaggctgagagccgc

SEQ ID NO: 2766 - DNA, 559 bp, Homo sapiens
acacatcatcggaaaacagactgataaatgcaaaccctgtgtgaaaggcacatggcactaatattgctcacacctgctacacctccttgggagccaagggaagccttttctgcaatctccccattttgatagaaacttatcacaaatttttttatagcaaaatatttaaaggtctctttccctgctcttcacttatctactaggaaggtatagaattaaaaagctttttttcccccagctgtgatcaagatgtattaaaagaatatgaaagagcatctgggttattctagaagttctgtgatcaaaacatattaaaaaaaattaaagcgcatctgggttattctagaagttcctgggctttatacttggatatttacagaggaagttgaacttcaagttctgccactcttcaaaatgggtgacaggagaggacgtgataggacagttaaaaaaaaattgatagtcattctctgatggagtgaagcaagctttgtcaaccatcaacaaatatgacttcattggtcacaagcccctgcagagatccaacaagatttgagtt

SEQ ID NO: 2767 - DNA, 57 bp, Homo sapiens
  misc_feature 36, 51: n = A,T,C or G
gaacagggaggagtctgtgcagtttctgacacttgntgttgaacatggctnaataca

SEQ ID NO: 2768 - DNA, 345 bp, Homo sapiens
acattttaattattcaatttctactttgtaaaaatagggaaattatttgaagtgatatatttggttaaacatttctaaaaataaactaccaatactaaatagtaagaaacctaactttagtagcaaatcttgattaattgaagaaataaaatatttcggataaggtttcataatttacaaatgggaatttcatttataataataaatatgagtgtcctttatttgcctagtagaagtgataaattgtgttatatatgataatttatataaaaccactaattgttccgttaagcttcacagaaaataaaacctctattactagacatttatgtaacatcttgctgt

SEQ ID NO: 2769 - DNA, 437 bp, Homo sapiens
  misc_feature 428, 431: n = A,T,C or G
actgaaatttgtcacctttctctacaaacccccagcaatccaatccaagtccatagcttcagaaagccaggagttgtgtcttcagtcagtctacgcctctggttcttggtttttctttcatgggagggagatcacaatatttcaaacagggaacaaaaccagttgagcttccagctcaggtctgtgtaagatggagcgaggaaagaccccactgactccagagaaaaagggtaaggttgagatggattatttctttacagctttgtgaaaatggaagaaaaaagatttacaaatgaggatccatttcatagatgagaatctcttcataaatgaaggctccagctcctaaaatgggaggggcctgactggacagcctgaatcagatgaggaatcggccacactgaataaaaacaatctgaaaaataatnctnttaatt

SEQ ID NO: 2770 - DNA, 587 bp, Homo sapiens
  misc_feature 539, 553, 582: n = A,T,C or G
accatttgcctcccgggctcaagcgattctcctgcctcagcctcccaagtagctgggattacaggcacctgccaccatgcccggctaatttttgtaattttagtagagacagggtttcaccatgttgcccaggctggtttcgaactcctgacctcaggtgatccacccgcctcggcctcccaaagtgctgggattacaggcttgagcccccgcgcccagccatcaaaatgctttttatttctgcatatgttgaatactttttacaatttaaaaaaatgatctgttttgaaggcaaaattgcaaatcttgaaattaagaaggcaaaaatgtaaaggagtcaaaactataaatcaagtatttgggaagtgaagacgaagctaatttgcattaaattcacaaacttttatactctttctgtatatacattttttttctttaaaaaacaactatggatcagaatagctacatttggaacactttttgttatcagtcaatatttttagatagttagaacctggtcctaagcctaaaagtgggcnttgattctgcagtnaatcttttacaactgcctcgacacacatnaacct

SEQ ID NO: 2771 - DNA, 501 bp, Homo sapiens
acctgtgggtttattacctatgggtttatatcctcaaatacgacattctagtcaaagtcttggtaatataaccaatgttttcaaatgtattctgttatacaaagagcagatttttattgaacttgtgcaataactatattaccatacaatataaatattcatgaatagtttcccaagtctggagcgaccacatagggagaaaatgtaaatgtctcaatttttgttcacaaaagtatattttatcaaattgctgtaagctgtggatagcttaaaagaaaaaaagtttcctgaaatctgggaaacaagacatttaaagaatcagcaaaatttcaaataaaaaattatgaaaatattatcctcattagttcatttagtcccatgaaattaattattttctctgcttgatcttggtggacagtttcatgaagctgtcagttagttcattaaagttttggaaattctcagacagtgcagtggtatcagaaacttgtattcaagagt

SEQ ID NO: 2772 - DNA, 480 bp, Homo sapiens
accaaaccattttatgagttttctgttagcttgctttaaaaattattactgtaagaaatagttttataaaaaattatatttttattcagtaatttaattttgtaaatgccaaatgaaaaacgttttttgctgctatggtcttagcctgtagacatgctgctagtatcagaggggcagtagagcttggacagaaagaaaagaaacttggtgttaggtaattgactatgcactagtatttcagactttttaattttatatatatatacattttttttccttctgcaatacatttgaaaacttgtttgggagactctgcattttttattgtggtttttttgttattgttggtttatacaagcatgcgttgcacttcttttttgggagatgtgtgttgttgatgttctatgttttgttttgagtgtagcctgactgttttataatttgggagttctgcatttgatccgcatcccctgtggtttc

SEQ ID NO: 2773 - DNA, 539 bp, Homo sapiens
  misc_feature 41, 43, 60, 88, 215, 221, 264, 327, 339, 357, 374, 388, 416,496: n = A,T,C or G
tacaagctttttttttttttttttttttttttttttttagngntgaggattttttattgngttttccacatagataaaaaaataaggntttttgatgaaaagaatccattacaaagtcaaaaatccattacaattataattgaatcagtaacaaaatttagctttaaatgagtcaagtattctgcatttgaaatttaatatcacaaacattcaanattagngaattttggtaagaaaaaaatactagaagaaaggaaaaggacnccttttcaacagatagtaatttataaaaatttttttaaaagtgctttgggaaaacacacagtntcattacttaanaaaagtcatttaaggaanacttaagtgcttcaagnggagtgtattacanactaaaaaatgttttaaaatttgccaanaaatttaagtgttaaaaatactcttctccttattcagtttcatgtttaaggaaacatttgacagacaagtaaaccaaacncaaaaaaaagttcacctgcattttaaactaataaattctggat

SEQ ID NO: 2774 - DNA, 242 bp, Homo sapiens
  misc_feature 212, 223: n = A,T,C or G
acatctttttctttcaatttgcatacaatggaaaaacaagtatatatatattttacaaagtttaactaataagacactagagcaaattgacagtttaagtctataggtgagaaattatctaataaaaataatcaattttttcagcattagtcacttccataaccaagtgttattctgattaataaaacttgctgtcaatcagaattctggtntatactcatancattactcaacttgtagta

SEQ ID NO: 2775 - DNA, 373 bp, Homo sapiens
acgactctgtgaacagctctccacagttataccaaactcacatgtttattacagaagaggactggctctgaaaaaaattattccacagtgcatcgcaagagatttcacagacctgattgttattaatgaagatcgtaaaaccccaaatggacttattttgagtcacttgccaaatggcccaactgctcattttaaaatgagcagtgttcgtcttcgtaaagaaattaagagaagaggcaaggaccccacagaacacatacctgaaataattctgaataattttacaacacggctgggtcattcaattggacgtatgtttgcatctctctttcctcataatcctcaatttatcggaaggcaggttgccacattc

SEQ ID NO: 2776 - DNA, 365 bp, Homo sapiens
actgtaaaatacaagattaattctcctatgtaataagaggaaagtttatcctctatactattcagatgtaaggaatgatatattgcttaattttaaacaatcaagactttactggtgaggttaagttaaattattactgatacatttttccaggtaaccaggaaagagctagtatgaggaaatgaagtaatagatgtgagatccagaccgaaagtcacttaattcagcttgcgaatgtgctttctaaattataaagcacttgtaaatgaaaaatttgatgctttctgtatgaataaaactttctgtaagctaggtattgtctctacaaaattctcattgtatagttaaaccacagtgagaagggt

SEQ ID NO: 2777 - DNA, 401 bp, Homo sapiens
  misc_feature 383: n = A,T,C or G
acaattccttgcttctttatgcaacctaacaaaataatatagaatgaagtcattagaaaaatatgaacctttctgaatctatattacatttttaatttaaattggaaaatacagtttagatcatatgaaacatatggatttcagacatgtattatctgtttctaacagattattacaggcggtctttattttggctgaaatgcaaaaatatgactttcttaataacagattagttaaaaatactttccattgatagcagtgctagtccctagaacaaaaggtaagcaaaacttatttgtaagttactgcctattcaatgcccagaatatgtagatcctaaatctaagcccttaatatacatctactttaaagataactgaaanatctcacatgcctgataa

SEQ ID NO: 2778 - DNA, 503 bp, Homo sapiens
acttcagttggtgcacaaaatactgtcatttgctcaaagctggctgccaaatgtttggtgatgaaggcagaaatgaatggctcaaaacttgggagaagagcaaaacctgaaggggccctccagaacaatgatgggctttatgatcctgactgcgatgagagcgggctctttaaggccaagcagtgcaacggcacctccacgtgctggtgtgtgaacactgctggggtcagaagaacagacaaggacactgaaataacctgctctgagcgagtgagaacctactggatcatcattgaactaaaacacaaagcaagagaaaaaccttatgatagtaaaagtttgcggactgcacttcagaaggagatcacaacgcgttatcaactggatccaaaatttatcacgagtattttgtatgagaataatgttatcactattgatctggttcaaaattcttctcaaaaactcagaatgatgtggacatagctgatgtggcttattatttt

SEQ ID NO: 2779 - DNA, 448 bp, Homo sapiens
gctagctagtgttgaagctaaaaatagctttatttatgctgaattgtgatttttttatgataaattttttttagttctaatcattgatgatagcttggaaataaataattatgccatggcatttggcagttcattattcctataagaattaaattgagtttagagagaatggtggtgttgagctgattattaacagttactgaaatcaaatatttatttgttacattattccatttgtattttaggtttccttttacattctttttatatgcattctgacattacatattttttaagactatggaaataatttaaagatttaagctctggtggatgattatctgctaagtaagtctgaaaatgtaatattttgataatactgtaatatacctgtcacacaaatgcttttctaatgttttaaccttgagtattgcagttgctgctttgt

SEQ ID NO: 2780 - DNA, 217 bp, Homo sapiens
atttttagataattcaagtgcttagataaattatgttttctttaagtgtttatggtaaactcttttaaagaaaatttaatatgttatagctgaatctttttggtaactttaaatctttatcatagactctgtacatatgttcaaattagctgcttgcctgatgtgtgtatcatcggtgggatgacagaacaaacatatttatgatcatgaataatgt

SEQ ID NO: 2781 - DNA, 351 bp, Homo sapiens
accatacatgagttatttctaagtttgaaaagtaaaaagaaattgcatcacactaattacaaaatacaagttctggaaaaaatatttttcttcattttaaaacttttttaactaataatggctttgaaagaagaggcttaatttgggggtggtaactaaaatcaaaagaaatgattgacttgagggtctctgtttggtaagaatacatcattagcttaaataagcagcagaaggttagttttaattatgtagcttctgttaatattaagtgttttttgtctgttttacctcaatttgaacagataagtttgcctgcatgctggacatgcctcagaaccatgaatagcccgt

SEQ ID NO: 2782 - DNA, 568 bp, Homo sapiens
acttccaactctgggttggccccaaatccaactaatgccaccaccaaggcggctggtggtgccctgcagtcaacagccagtctcttcgtggtctcactctctcttctgcatctctactcttaagagactcaggccaagaaacgtcttctaaatttccccatcttctaaacccaatccaaatggcgtctggaagtccaatgtggcaaggaaaaacaggtcttcatcgaatctactaattccacaccttttattgacacagaaaatgttgagaatcccaaacttgattgatttgaagaacatgtgagaggtttgactagatgatggatgccaatattaaatctgctggagtttcatgtacaagatgaaggagaggcaacatccaaaatagttaagacatgatttccttgaatgtggcttgagaaatatggacacttaatactaccttgaaaataagaatagaaataaaggatgggattgtggaatggagattcagttttcatttggttcattaattctataaggccataaaacaggtaatataaaagcttccatgattctatttatatgt

SEQ ID NO: 2783 - DNA, 491 bp, Homo sapiens; identical to SEQ ID NO: 2451

SEQ ID NO: 2784 - DNA, 157 bp, Homo sapiens
  misc_feature 42, 71, 85, 107, 111, 117, 119, 149: n = A,T,C or G
acaagctttttttttttttttttttttttttttttttagttnatgtaaaaatttatttgaccaaaatgtanaaaaagtgatactnttacatatgatacagttgcaanaatntaaagngnggattttattccattgcacaatttgctagngtatttcc

SEQ ID NO: 2785 - DNA, 462 bp, Homo sapiens
gtctataacttcatcctcagtatgttcccaaatctgtgctggcattgaaaggacaaaacattatactagtgggtttttctactaattattttttgaagcattattttcccaacacaaaagagcttttttctcggtataatgaaaattgaaatcctatgtgtattcaatagtaaatagacaaattttattttttatttccacttgaagagttacatttcgtataaaagtttacaaataacggtttttattttgattttttcagtataaaaaaagttgccttgatggcatattatgatgtaatgctaattgcttgtaggatagtaaatggtcagtattgaaacctaatctctagctgccgtcttgtagatatgaacgaatgttcaccaagcatgtattttgtattttgttgcattgtacactgcaactaataagccaaggaatcgacatatattaggtgcgtgt

SEQ ID NO: 2786 - DNA, 197 bp, Homo sapiens
acttgccttgggcctcctatgatgcagacatggtgaatttaattcaaggaggaggagaatgttttaggcaggtggttatatgtgggaagataattttattcatggatccaaatgtttgttgagtcctttctttgtgctaaggttcttgcggtgaaccagaattataacagtgagctcatctgactgttttaggatgt

SEQ ID NO: 2787 - DNA, 217 bp, Homo sapiens; identical to SEQ ID NO: 2780

SEQ ID NO: 2788 - DNA, 284 bp, Homo sapiens
  misc_feature 235: n = A,T,C or G
acagtggtccttttcagagttggacttctagactcacctgttctcactccctgttttaattcaacccagccatgcaatgccaaataatagaattgctccctaccagctgaacagggaggagtctgtgcagtttctgacacttgttgttgaacatggctaaatacaatgggtatcgctgagactaagttgtagaaattaacaaatgtgctgcttggttaaaatgactacactcatntgactcattctttattctattttagttggtttgtatcttgcctaaggtg

SEQ ID NO: 2789 - DNA, 255 bp, Homo sapiens
  misc_feature 175: n = A,T,C or G
acgcttggttttgatggtggcaatggcagcattgacatctttgggaaccacgtcaccacggtataacaggcagcaagccatgtatttaccatggcgagggtcacatttcaccatctggttggctggctcaaagcaagcattggtgatctctgctacagaaagctgttcatggtangctttctcagcagagatgacaggggcatatgtggccagagggaagtggatgcgggggtagggcaccaggttggtctggaa

SEQ ID NO: 2790 - DNA, 135 bp, Homo sapiens
  misc_feature 10, 48, 59, 64, 74, 76, 92, 122: n = A,T,C or G
actttgtgtntttcttttaactgtgtatatttctactgatctgatctnactgtttatgntgctntccaaagatntntgttgcataatacagnggatctgaatttattattgcttataaaacncatttgatggaat

SEQ ID NO: 2791 - DNA, 472 bp, Homo sapiens; identical to SEQ ID NO: 2327

SEQ ID NO: 2792 - DNA, 481 bp, Homo sapiens
acaagtattcttgatctcagagacaagttcaatgaatctcttcaagtgaatactactgctctcatcccaaaggaagccaactctgaggaagtctttttgtttaaaccagaaaacattacttttgaaaatggcacagatcttttcattgctattcaggctgttgataaggtcgatctgaaatcagaaatatccaacattgcacgagtatctttgtttattcctccacagactccgccagagacacctagtcctgatgaaacgtctgctccttgtcctaatattcatatcaacagcaccattcctggcattcacattttaaaaattatgtggaagtggataggagaactgcagctgtcaatagcctagggctgaatttttgtcagataaataaaataaatcattcatcctttttttgattataaaattttctaaaatgtattttagacttcctgtagggggcgatatactaaatgtatatagt

SEQ ID NO: 2793 - DNA, 504 bp, Homo sapiens
actttctatgagaagcgtatggccacagaagttgctgctgacgctctgggtgaagaatggaagggttatgtggtccgaatcagtggtgggaacgacaaacaaggtttccccatgaagcagggtgtcttgacccatggccgtgtccgcctgctactgagtaaggggcattcctgttacagaccaaggagaactggagaaggaaagagaaaatcagttcgtggttgcattgtggatgcaaatctgagcgttctcaacttggttattgtaaaaaaaggagagaaggatattcctggactgactgatactacagtgcctcgccgcctgggccccaaaagagctagcagaatccgcaaacttttcaatctctctaaagaagatgatgtccgccagtatgttgtaagaaagcccttaaataaagaaggtaagaaacctaggaccaaagcacccaagattcagcgtcttgttactccacgtgtcctgcagcacaaacggcggcgtattgct

SEQ ID NO: 2794 - DNA, 483 bp, Homo sapiens
acaagtattcttgatctcagagacaagttcaatgaatctcttcaagtgaatactactgctctcatcccaaaggaagccaactctgaggaagtctttttgtttaaaccagaaaacattacttttgaaaatggcacagatcttttcattgctattcaggctgttgataaggtcgatctgaaatcagaaatatccaacattgcacgagtatctttgtttattcctccacagactccgccagagacacctagtcctgatgaaacgtctgctccttgtcctaatattcatatcaacagcaccattcctggcattcacattttaaaaattatgtggaagtggataggagaactgcagctgtcaatagcctagggctgaatttttgtcagataaataaaataaatcattcatccttttttttgattataaaattttctaaaatgtatttagacttcctgtagggggcgatatactaaatgtatatagtac

SEQ ID NO: 2795 - DNA, 334 bp, Homo sapiens
acacagtggtggatgagaatgcagtggccaaaattgatgcagcctcgcccctggagaaagtctgcctcattggctgtggattttcgactggttatgggtctgcagtcaaagttgccaaggtcaccccagggtctacctgtgctgtgtttggcctgggaggggtcggcctatctgttgttatgggctgtaaagcagctggagcagccagaatcattgctgtggacatcaacaaggacaaatttgcaaaggctaaagagttgggtgccactgaatgcatcaaccctcaagactacaagaaacccattcaggaagtgctaaaggaaatgactgatgg

SEQ ID NO: 2796 - DNA, 270 bp, Homo sapiens
actgaagtgtaagttgaaaccaagttgcagtgggaaatcaaaggtgaggtagcttatttgaaaccagcaaatgagacaggttggacagttttaaaatctcttctaacaaagaaactgcacggtagcaaggactagcggttctcaaagcccttctttttcagtgttctcattcaccttggcacccaagtatgtttaacaggccatgcattaaaaataaatacaaaaatataaaagccgcttaaagggaacttacaaactgacaatctctcc

SEQ ID NO: 2797 - DNA, 472 bp, Homo sapiens
  misc_feature 435, 467: n = A,T,C or G
acctgtgggtttattacctatgggtttatatcctcaaatacgacattctagtcaaagtcttggtaatataaccaatgttttcaaatgtattctgtcatacaaagagcagatttttattgaacttgtgcaataactatattaccatacaatataaatattcatgaatagtttcccaagtctggagcgaccacatagggagaaaatgtaaatgtctcaatttttgttcacaaaagtatattttatcaaattgctgtaagctgtggatagcttaaaagaaaaaaagtttcctgaaatctgggaaacaagacatttaaagaatcagcaaaatttcaaataaaaaattatgaaaatattatcctcattagttcatttagtcccatgaaattaattattttctctgcttgatcttggtggacagtttcatgaagctgtcanttagttcattaaagttttggaaattctcaganagtgc

SEQ ID NO: 2798 - DNA, 419 bp, Homo sapiens
  misc_feature 380, 389: n = A,T,C or G
acttatttcaacaattcttagagatgctagctagtgttgaagctaaaaatagctttatttatgctgaattgtgatttttttatgccaaattttttttagttctaatcattgatgatagcttggaaataaataattatgccatggcatttgacagttcattattcctataagaattaaattgagtttagagagaatggtggtgttgagctgattattaacagttactgaaatcaaatatttatttgttacattattccatttgtattttaggtttccttttacattctttttatatgcattctgacattacatattttttaagactatggaaataatttaaagatttaagctctggtggatgattatctgctaagtaagtntgaaaatgnaatattttgataatactgtaatatacctgt

SEQ ID NO: 2799 - DNA, 337 bp, Homo sapiens
acacgtttgaaaccaactactgtagaagatgaggaatctattgtaattttttgctttattttcatctgccagtggacttatttgaaattttcactttagtcaaattattttttgtattagtttttgatgcggacataaaaatagcaatcattttaaattgtcaaaatttccagattactggtaaaaattatttgaaaacaaacttatgggtaataaaggctagtcagaaccctataccataaagtgtagttaccatacagattaatatgtagcaaaaatgtatgcttgatatttctcaactgtgttaatttttctgctgtattccagctgaccaaaa

SEQ ID NO: 2800 - DNA, 375 bp, Homo sapiens
accaaagtagtaacttcttcccaacaggttatgaaagctacaaataaaatcatcaccatgaaaaatgacagccagtaactctgaatgctgacatagaaaggacagtgacgagaataagcattctgtgccttcaggctttggtagatggctgggtctcccaaaacataagcaaggactgaaatccaaattaaaattactgtaaagaaataaaataatttttgacacttaaatgaaagcttggttgttttagagaaattcaggcaataatctatacaagctgtcaggaaaactggataatgcaaaaagccataagtaaaggaaataatttgagtaaataggcagatgtggtatttagtgaacctaatgcttaaaagt

SEQ ID NO: 2801 - DNA, 366 bp, Homo sapiens
actagatccagaaacttagtgtaatgccctgctttatatttctttgacttaacattggtttcagaaagaatcttagctacctagaatttacagtctctgtttcatggcaacactggataatggctttgtgaaatttaaaaaatttttgtagcgactgtaaacagaaatgccaaattgatggttaattgttgctgcttcaaaaataagtataaaattaatatgtaaggaagcccattctttcatgttaaatacttggggtgggaggggagaaagggaaccttttcttaaaatgaaaataattactgctattttaaaatttcttgatcattgaatgtgagacccttctaacatgatttgagaagctgt

SEQ ID NO: 2802 - DNA, 391 bp, Homo sapiens
acacaaatgtttatttctcaattaaacattccctttaaacacaaggaatgagttctaaatcttcataaagatgaattaaaaatgaaatccctccagtatagtgtatataatcactgtgttcttggtcactactggcatttactgtttaacatcaaaaacaaagacaggttatttaaaaatcatgctactggatttctagctcttcctctatgaccagttctacactgatctgcaatgtttaaaagtttacatcaccaaatcaaagcaagtttaaggtgtgaagtagctgtgcattaaacacaaaataaacaataaaattataagatatagtcaagttcataacgaatataggtgttcttatcatcgttgtagattcttgggtaatgtgcta

SEQ ID NO: 2803 - DNA, 482 bp, Homo sapiens
  misc_feature 463, 471: n = A,T,C or G
acacaacacatatttgttcaatgaatgaatgaatgtcttctaaaagactcctctgattgggagaccatatctataattgggatgtgaatcatttcttcagtggaataagagcacaacggcacaaccttcaaggacatattatctactatgaacattttactgtgagactctttattttgccttctacttgcgctgaaatgaaaccaaaacaggccgttgggttccacaagtcaatatatgttggatgaggattctgttgccttattgggaactgtgagacttatctggtatgagaagccagtaataaacctttgacctgttttaaccaatgaagattatgaatatgttaatatgatgtaaattgctatttaagtgtaaagcagttctaagttttagtatttgggggattggtttttattatttttttcctttttgaaaaatactgagggatcttttgataaanttagtaantgcatgttaga

SEQ ID NO: 2804 - DNA, 474 bp, Homo sapiens
acgatcgaagggactatgtcttcattgaattttgtgttgaagacagtaaggatgttaatgtaaattttgaaaaatccaaacttacattcagttgtctcggaggaagtgataattttaagcatttaaatgaaattgatctttttcactgtattgatccaaatgattccaagcataaaagaacggacagatcaattttatgttgtttacgaaaaggagaatctggccagtcatggccaaggttaacaaaagaaagggcaaagcttaattggcttagtgtcgacttcaataattggaaagactgggaagatgattcagatgaagacatgtctaattttgatcgtttctctgagatgatgaacaacatgggtggtgatgaggatgtagatttaccagaagtagatggagcagatgatgattcacaagacagtgatgatgaaaaaatgccagatctggagtaaggaatattgtcatcac

SEQ ID NO: 2805 - DNA, 487 bp, Homo sapiens
actcatttttcttattacttatttgtaaaggaacttctttggatcctgcttaaatgatcaccaagaaactgcaaatttctatgggggaaaatgtgagtcctcttcataaattttagcagcccttcaaggacatatacatcaaaatttggtggcctttaaagtattggaattttaaatgacataactgcactttactgttgaagacccttttagtttaatatttatagccatttcctcatattttctttaaaatttatcagtatagcatttcatttctatgcatgtatatgtatagtaattcataaaactaaatagcaaactgatattctacaccagttcatttatctcaatatatattttggaatataacggcaatattaaaaatatcaattccctctaagctgataatactataagattttacacaaagttaaagtttttgttttttctttttgaaaaagtttcattgtttaaagtccacatattt

SEQ ID NO: 2806 - DNA, 521 bp, Homo sapiens
gccagcgcaggggcttctgctgagggggcaggcggagcttgaggaaaccgcagataagtttttttctctttgaaagatagagattaatacaactacttaaaaaatatagtcaataggttactaagatattgcttagcgttaagtttttaacgtaattttaatagcttaagattttaagagaaaatatgaagacttagaagagtagcatgaggaaggaaaagataaaaggtttctaaaacatgacggaggttgagatgaagcttcttcatggagtaaaaaatgtatttaaaagaaaattgagagaaaggactacagagccccgaattaataccaatagaagggcaatgcttttagattaaaatgaaggtgacttaaacagcttaaagtttagtttaaaagttgtaggtgattaaaataatttgaaggcgatcttttaaaaagagattaaaccgaaggtgattaaaagaccttgaaatccatgacgcagggagaattgcgtcatttaaagcctagttaacgca

SEQ ID NO: 2807 - DNA, 367 bp, Homo sapiens
  misc_feature 78, 79: n = A,T,C or G
acagctaaaatcctgacactataatttgggtattcctgctttagggtctccagtttatcaggtctgtccatagaaaanngaaactggaattatagtcagtcttgctaacacttagaaactactttaaaatacaataaaattttcatttaccctaaaagtccaaatgggaggggatatattttgttaccaatttcaatgtaacagtatggcaaattcacacctcattttggctgggctttcaaaattaaaaaaaaaatcaccttagttctgacattatctaagttgtggctgcttcagaaggtcatatgacaaaatatttaccaaataattaaaaataataataataatattccttttacaaaatggt

SEQ ID NO: 2808 - DNA, 424 bp, Homo sapiens
acgatgtctagtgatgagtttgctaatacaatgccagtcaggccacctacggtgaaaagaaagatgaatcctagggctcagagcactgcagcagatcatttcatattgcttccgtggagtgtggcgagtcagctaaatactttgacgccggtggggatagcgatgattatggtagcggaggtgaaatatgctcgtgtgtctacgtctattcctactgtaaatatatggtgtgctcacacgataaaccctaggaagccaattgatatcatagctcagaccatacctatgtatccaaatggttctttttttccggagtagtaagttacaatatgggagattattccgaagcctggtaggataagaatataaacttcagggtgaccgaaaatcagaataggtgttggtatagaatggggtctcctcc

SEQ ID NO: 2809 - DNA, 417 bp, Homo sapiens
  misc_feature 390: n = A,T,C or G
accaagggatggaagaagtaaatatagctcaggtagcactttatactcaggcagatctcagccctctactgagtcccttagccaagcagtttctttcaaagaagccagcaggcgaaaagcagggactgccactgcatttcatatcacactgttaaaagttgtgttttgaaattttatgtttagttgcacaaattgggccaaagaaacattgccttgaggaagatatgattggaaaatcaagagtgtagaagaataaatactgttttactgtccaaagacatgtttatagtgctctgtaaatgttcctttcctttgtagtctctggcaagatgctttaggaagataaaagtttgaggagaacaaacaggaattctgaattaagcacagagntgaagtttatacccgtttcacatgctt

SEQ ID NO: 2810 - DNA, 448 bp, Homo sapiens
acacagtggtttattaaaggaatgtatggcccacatcaacctagcaaggattctactggtaaaccttcccatggccaaaggaaaaacaagcaggagttgagtggctggggtggggtgcaggcaatggagagagggcagaagggtgtagaagctgaagggggctagaagcttactcctgagtttcttccttctgtcttcaaatctttacttcttatggccaaagacccagctgtttcataggctggagatgcactcttctagactgctcgagacagccagagacaggggaggagggaagaaggatactgtggaaagggatggcggggcaaacatttagagctagaagccactactgggccaatgctaaagtttctgtctctaagcctaaaaaagccagtgtagtagggcccttatcactcttagtttgctaggtttcccctctgaaata

SEQ ID NO: 2811 - DNA, 294 bp, Homo sapiens
  misc_feature 79, 122, 123, 205, 267: n = A,T,C or G
acaagcttttttttttttttttttttgaaaaagtcatggaggccatggggttggcttgaaaccagctttggggggttcnattccttccttttttgtctaaattttatgtatacgggttcttnnaatgtgtggtagggtggggggcatccatatagtcactccaggtttatggagggttcttctactattaggacttttcgcttcnaagcgaaggcttctcaaatcatgaaaattattaatattactgctgttagagaaatgaatgancctacagatgataggatgtttcatgtg

SEQ ID NO: 2812 - DNA, 430 bp, Homo sapiens
accgttgtgtgttttctgcaatgtggagttgacttagcttggcattttagatttgttaaaactattttttccataaatactttgaaacgtatttatatatttcaatttaaggaatctttttgccatgtgtatgcaaatattattttcttcatacattcattttcttttcaggggaaaattttgggatgggggactcaggaggacctgtgaagcatgtagttatctagatctgggtaatttcatgtttattaaactcgaactttggctagttaaactcatattgaaacttcatctagtctcttaattttttaacactaaattcaagtcatttgttttaagtctctaaaaaagaagattgcagtcatccattcatatgcatggggtctgatcgcaaatacactaaatgtggagtgtaggaaccaaaatgaaa

SEQ ID NO: 2813 - DNA, 478 bp, Homo sapiens
  misc_feature 463, 468: n = A,T,C or G
ggcctcttacctggacagagtgaggagcctggagaccgagaaccggaggctggagagcaaaatccgggagcacttggagaagaagggaccccaggtcagagactggagccattacttcaagatcatcgaggacctgagggctcagatcttcgcaaatactgtggacaatgcccgcatcgttctgcagattgacaatgcccgtcttgctgctgatgactttagagtcaagtatgagacagagctggccatgcgccagtctgtggagaacgacatccatgggctccgcaaggtcattgatgacaccaatatcacacgactgcagctggagacagagatcgaggctctcaaggaggagctgctcttcatgaagaagaaccacgaagaggaagtaaaaggcctacaagcccagattgccagctctgggttgaccgtggaggtagatgcccccaaatctcaggacctngccanatcatggcag

SEQ ID NO: 2814 - DNA, 315 bp, Homo sapiens
accaatttttagaaacatattgtcttctcagattgaagtggagggtccagaaatgcaacacccagcattctttaaagaaaataatagctagaatctttctgatacagattccaatatagattccattattcaaagtcctccacaaattactgggaaaatgtaagaggtaacttcacaaaaatcacatattgagtggaataattataactgatatataaataaggatttactaaaaaaaggcttcaaggggtgatattttaaatcaaggttttaaatacaaaaggtgtcttgtgttgcttaatcatacagtttcgt

SEQ ID NO: 2815 - DNA, 434 bp, Homo sapiens
actgcttctgagaacctggctgcagatccttagcataggcagcaaatgttgagaaagtctatctgtagtattacatatactaagttacagaggatgcattcaagtagagaaaataatatgtgggttaagatacatccttaaactttttttttgggggggggggacggagtcttgctgcaacgcccaggctggagtgcaatggcactatctcagctcgctgcaaccttcacctcctgggttcaagcaattctcctgcctcagcctcctgagtagctgggaatataggtgcacaccaccatgcctggctaatttttgtattttcagtagaagcagagtttcaccatattggccaggttggtctcgaactcctgacctcaagtgatctgcctgcctcagcctcccaaagtgctgggattacacgcgtgagccaccac

SEQ ID NO: 2816 - DNA, 255 bp, Homo sapiens
acttagcattttcatttcacctggggtcttgaagcacttcctgaaaactgattgtgccttgacatttacctgtaaaaagaagtgtaattctacccctttggcagatgtgtaaactaagacggtgcaaggcccacagaagtaaggagaggaccaggaaagctgacagtgaatctcctgctttgtccatcaggtcctaaaagtgtctctcacttgtaattccacagaagtgaataaagcataacttctttgactggg

SEQ ID NO: 2817 - DNA, 391 bp, Homo sapiens
acatttatcagttagggtggggcaggaacaaatcacaatgttggaatgtcatcagttaaggctgtttttacttcttttgtggatcttcagttactttaggccatctggatgtatacgtgcaagtcacaggggatgcgatggcctggcctgggctcagaggcctgacattcctgccttcttatattaataagacaaataaaacaaaatagtgttgaagtgttggggcagcgaaaatttttggggggtggtatggagagataatgggcgatgtttctcagggctgcttcaagcgggattaggggcggcgtgggagcctagagtgggagagattaagctgaagggaggtcttgtggtaaggggtgatatcatggggatgttagaagaaacattt

SEQ ID NO: 2818 - DNA, 222 bp, Homo sapiens
actatgaggggaaggagttcgagacacgactgaaggagaagaagccaggagatctgtctgatgagctaaggatttccttggggatgccagtaggaccaaatgcccacaaggtccctcccccatggctgattgccatgcagcgatatggaccacccccatcgtatcccaacctgaaaatccctgggctgaactcgcccatccctgagagctgttcctttgggt

SEQ ID NO: 2819 - DNA, 293 bp, Homo sapiens
  misc_feature 256, 273, 280: n = A,T,C or G
caagtactcaccagcctcctggtctgcagagaagacagaatcaatatgagcacagcaggaaaagtaatcaaatgcaaagcagctgtgctatgggagttaaagaaacccttttccattgaggaggtagaggttgcacctcctaaggctcatgaagttcgtattaagatggtggctgcaggaatctgtcgttcagatgagcatgtggttagtggcaacctggtgaccccccttcctgtgattttaggccatgaggcanccggcatcgtggaaagngttgganaaggggtgactac

SEQ ID NO: 2820 - DNA, 543 bp, Homo sapiens
acatactagtcccttggcaaatctgttctttcaaagcataccttccccaaatgagcctacctacttcttaaaaacatataacacaatgtggtagtagtaggtgtaaggaaggtaagttttttcatagtggtatgcaaacatatcattgaaatattacatagatataaagacttagggaataaaaatagcagcaacaaatacttgatagatttatcctacttgggagaaatattttgtagcagagtatttagtatacttagaagttgatttagcaattaggctttaatgaccttacaaagtgaacataactgaacacaagtattttttcaatgcaagatgaggatgaaaattttaaatttcaacccatctggctaaagttaagacttagcaaaaattaaaatgttgcctttgtccaagtatagattaaggcaacaaacatatttgggtgtgtaatttgaagttttggactgaaatatctttgcaagtatccacataaaattctgtaatgccttataattatattctaataattatgcattatac

SEQ ID NO: 2821 - DNA, 307 bp, Homo sapiens
acaatcaggcttggattaagtctcttctcaggggcagctttgatttagccatggactcacaaggaaaacaagaggtggatttggttagggagcaacagcaaattcagcccgaccatattcctaatctaaacacattttcagcataaagatgtaaaaacaatttttttttggttcaaaagttatggttgccatggagacaaaaagaatatacctgaatttataaactgagatatatttcagctccttggcttaaaataatacatctttatattcttgagacatatctcaagatgttccttgctttgcc

SEQ ID NO: 2822 - DNA, 471 bp, Homo sapiens
acagcctacccatgcagggactgggattcgaggacttccaggcgcatagggtagaaccaaatgatagggtaggagcatgtgttctttagggccttgtaaggctgtttccttttgcatctggaactgactatataattgtcttcaatgaagactaattcaattttgcatatagaggagccaaagagagatttcagctctgtatttgtggtatcagtttggaaaaaaaaaatctgatactccatttgattattgtaaatatttgatcttgaatcacttgacagtgtttgtttgaattgtgtttgttttttcctttgatgggcttaaaagaaattatccaaagggagaaagagcagtatgccacttcttaaaacagaacaaaacaaaaagaaaattgtgctcttttctaatccaaagggtatatttgcagcatgcttgactttaccaattctgatgacatctttacggacacta

SEQ ID NO: 2823 - DNA, 406 bp, Homo sapiens
actgtctcatctcatcatattcacgggttctggagattagctcattgaaagggggaggggcattttcaaattctgcctaccacaggcaataactgcccatctcagctgtgggtggaatttttacccagaaaagataggccctagaagcctcatttcttttctccatggaaaaggacagccctctgctgcagcgttcaacttgtgtgtttactgacagagtgaactacagaaatagcttttcttcctaaaggggattgttctacattttgaagttattttttaataaaattgaattatgttgtgtattgtgcttcttaataggaaatgcattattggactgtttttgtaacatcctgtttattgcaaatagctagtatcgttcaaaaactgtataaaatacttttgt

SEQ ID NO: 2824 - DNA, 198 bp, Homo sapiens
  misc_feature 194: n = A,T,C or G
aaaaatacgaaaaaactagctgggcttggtggcgggtgcctgtaatcccagctacttgggaggctgaggcacaagaattgcttgataccaggaggcggaggttgcagtgagccaagattatgccactgcactccagcctgggcgacggagccagaccctgtctcgaaaaaaaaaaaaaaaaaaaaaaaaaaaangctt

SEQ ID NO: 2825 - DNA, 135 bp, Homo sapiens
  misc_feature 2, 15, 17, 19, 68, 130: n = A,T,C or G
tngagcggccgcccngncnggtactccctgttttgagaaactttcttgaagaacaccatagcatgctngttgtagttggtgctcaccactcggacgaggtaactcgttaatccagggtaactcttaatgntgccc

SEQ ID NO: 2826 - DNA, 150 bp, Homo sapiens
  misc_feature 45, 102, 119, 147, 150: n = A,T,C or G
ctttttttttttttttttttttttttttaggttacaatatggganattattccgaagcctggtaggataagaatataaacttcagggtgaccgaaaaatcanaataggtgttggtatanaatggggtctcctcctccggcggggtcnaan

SEQ ID NO: 2827 - DNA, 216 bp, Homo sapiens
acattatagcacagtgatcatcattccattcatacactcaaataactgctgcttctgatcactgaaaactagattcaaagtcattgctcaacaagctgatactacaaatcccttatattaacaggtagtttaaatgtggaaataaggcaaagcatacttgctagtcacaattactttcagatataattgagactacactgctatacataattaggc

SEQ ID NO: 2828 - DNA, 295 bp, Homo sapiens
acatcatgttattttattattattatttgcttttcatgtagaactcagcagttgacatccaaatctagccagagcccttcactgccatgatagctggggcttcaccagtctgtctactgtggtgatctgtagacttctggttgtatttctatatttattttcagtatactgtgtgggatacttagtggtatgtctctttaagttttgattaatgtttcttaaatggaattattttgaatgtcacaaattgatcaagatattaaaatgtcggatttatctttccccatatccaagt

SEQ ID NO: 2829 - DNA, 475 bp, Homo sapiens
acattcaggatccctcggccaaggactggaccagaagaacacttgggaatcttgggtccacttatcaaaggtgaagttggtgatatcctgactgtggtattcaagaataatgccagccgcccctactctgtgcatgctcatggagtgctagaatctactactgtctggccactggctgctgagcctggtgaggtggtcacttatcagtggaacatcccagagaggtctggccctgggcccaatgactctgcttgtgtttcctggatctattattctgcagtggatcccatcaaggacatgtatagtggcctggtggggcccttggctatctgccaaaagggcatcctggagccccatggaggacggagtgacatggatcgggaatttgcattgttgttcttgatttttgatgaaaataagtcttggtatttggaggaaaatgtggcaacccatgggtcccaggatccaggcagta

SEQ ID NO: 2830 - DNA, 168 bp, Homo sapiens
  misc_feature 78, 113, 158, 159: n = A,T,C or G
acccaggtcaagtgattttgaagactcagcacatctcatgcaaccagtccacaataagcctgttaaacaaggacctangtataatctacatcagatccagggtcactcagctnctcgacatttccacacccagacccaaagtttgcaacaatcagtcnnaaaattttc

SEQ ID NO: 2831 - DNA, 176 bp, Homo sapiens
  misc_feature 45, 90, 176: n = A,T,C or G
gtacaagctttttttttttttttttttttttgttggttatccacnagggtttatttccacttgagacccctgatgggagcaacaatgcanaggccctttacagaatggtgaagcatatgatataaaagatacaaaatataacatcatttacatgtgccattcatagacaaaggagn

SEQ ID NO: 2832 - DNA, 217 bp, Homo sapiens; identical to SEQ ID NO: 2780

SEQ ID NO: 2833 - DNA, 433 bp, Homo sapiens
acaatacagggttgctatcagcactggatcttgttgaagtcaatcctcagttggccacctcagaggaagaggcgaagactacagctaacctggcagtagatgtgattgcttcaagctttggtcagacaagagaaggagggcatattgtctatgaccaacttcctactcccagttcaccagatgaatcagaaaatcaagcacgtgtgagaatttaggagacactgtgcactgacatgtttcacaacaggcattccagaattatgaggcattgaggggatagatgaatactaaatggttgtctgggtcaatactgccttaatgagaacatttacacattctcacaattgtaaagtttcccctctattttggtgaccaatactactgtaaatgtatttggttttttgcagttcacagggtattaatatgctacagt

SEQ ID NO: 2834 - DNA, 455 bp, Homo sapiens
  misc_feature 378: n = A,T,C or G
gttcaatcaaatatctgaaaatactaaaggtcaaaaccttgtcagatgttaacttctaagttcggtttgggattttttttttttttaatagaaatcaagttgtttttgtttttaaggaaaagcgggtcattgcaaagggctgggtgtaattttatgtttcatttccttcattttaaagcaatacaaggttatggagcagatggttttgtgccgaatcatgaatactagtcaagtcacacactctggaaacttgcaactttttgtttgttttggttttcaaataaatataaatatgatatatataggaactaatatagtaatgcaccatgtaacaaagcctagttcagtccatggcttttaattctcttaacactatanataaggattgtgttacagttgctagtagcggcaggaagatgtcaggctcactttcctctgattcccgaaatgggggg

SEQ ID NO: 2835 - DNA, 537 bp, Homo sapiens
accaagggatggaagaagtaaatatagctcaggtagcactttatactcaggcagatctcagtcctctactgagtcccttagccaagcagtttctttcaaagaagccagcaggcgaaaagcagggactgccactgcatttcatatcacactgttaaaagttgtgttttgaaattttatgtttagttgcacaaattgggccaaagaaacattgccttgaggaagatatgattggaaaatcaagagtgtagaagaataaatactgttttactgtccaaagacatgtttatagtgctctgtaaatgttcctttcctttgtagtctctggcaagatgctttaggaagataaaagtttgaggagaacaaacaggaattctgaattaagcacagagttgaagtttatacccgtttcacatgcttttcaagaatgtcgcaattactaagaagcagataatggtgttttttagaaacctaattgaagtatattcaaccaaatactttaatgtataaaataaatattatacaatatacttgtatagc

SEQ ID NO: 2836 - DNA, 345 bp, Homo sapiens
actagaactactttaagtatgctgtgctttcttttcaagtgaggtatctatattgaggaaaaaaatcttataaattccttttacattaaactaatttaatacactattttgttttctgggctgaatttttaaatttttttcttacatttgatcactttctaattcaaaaattgtagcactacataggacatttaattctattactaaataggctccaaattacattatacagtttagaaaccatttcaatgaatggatttacaaaaaaaaaaaaactgtccttttaaatgaaatgcaatataaaatactaatacacttttcttccaaaagtggaaatgcttaagt

SEQ ID NO: 2837 - DNA, 485 bp, Homo sapiens
acgtgtgcgtaacacccgaaccaggaatctcagctatgaccttttcacttagctacgctaaatgtcagtccaagataaaagaggagattaaagataaaactgaagattaaagagactgtgagtagtgacacattcaagtgaggctgtaaatctaggtaagtgacactaagaacctgaagagaccctatgaacttttccctaggaggccgtttccaactgccctatgacaaacagctgatcatcacgtttataatgatggttcactcacggagcttcgaacttattcatacctacatttaattgatcaccacgaatgggtaggcagacgtgtcagaccttcaggggactctccttccccacagcccccaaaccttctatacaaagtccctctgctttaagtcaaaaggtcaattctggattaaaacttgtccgcactaagtttataggaggtaacatgcaaataatgtgataaagttaaaatgact

SEQ ID NO: 2838 - DNA, 370 bp, Homo sapiens
  misc_feature 306: n = A,T,C or G
ggggagggtgccctcctatccccacctactcctgggtcaggaggaaaagactaacaggagaatgcacagtgggtggagccaatccactccttcctttctatcattcccctgcccacctccttccagcactgactggaagggaagttcaggctctgagacacgccccaacatgcctacacctgcagcgcgcacacgcacgcacacacacatacagagctctctgagggtgatggggctgagcaggaggggggctgggtaagagcacaggttagggcatggaaggcttctccgcccattctgacccanggcctaggacggataggcaggaacatacagacacatttacactagagaccagggatagaggata

SEQ ID NO: 2839 - DNA, 324 bp, Homo sapiens
  misc_feature 215, 218, 227: n = A,T,C or G
ctcgtttatcaccagtgaggagcaggacgtgagcccccgccctgcacctctgctgttaaacaccccagccatcccttctttcaaaagggatcctttcataggagaacacactgaggagatacttgaagaatttggattcagccgcgaagagatttatcagcttaactcagataaaatcattgaaagtaataaggtaaaagctagtctctaacttncangcccacggntcaagtgaatttgaatactgcatttacagtgtagagtaacacataacattgtatgcatggaaacatggaggaacagtattacagtgtcctaccactc

SEQ ID NO: 2840 - DNA, 472 bp, Homo sapiens
gtcaagagcatcacagtctctgcatctggaacttctcctggtctctcagctggggccactgtcggcatcatgattggagtgctggttggggttgctctgatatagcagccctggtgtagtttcttcatttcaggaagactgacagttgttttgcttcttccttaaagcatttgcaacagctacagtctaaaattgcttctttaccaaggatatttacagaaaagactctgaccagagatcgagaccatcctagccaacatcgtgaaaccccatctctactaaaaatacaaaaatgagctgggcttggtggcgcgcacctgtagtcccagttactcgggaggctgaggcaggagaatcgcttgaacccgggaggtggagattgcagtgagcccagatcgcaccactgcactccagtctggcaacagagcaagactccatctcaaaaagaaaagaaaagaagactctgacctgt

SEQ ID NO: 2841 - DNA, 69 bp, Homo sapiens
acggacatgatccgtttaatgacttaggctcctcacatggttaaacagtgaggatttcctatggaagac

SEQ ID NO: 2842 - DNA, 382 bp, Homo sapiens
  misc_feature 52: n = A,T,C or G
gtaaaagtttgcggactgcacttcagaaggagatcacaacgcgttatcaacntggatccaaaatttatcacgagtattttgtatgagaataatgttatcactattgatctggttcaaaattcttctcaaaaaactcagaatgatgtggacatagctgatgtggcttattattttgaaaaagatgttaaaggtgaatccttgtttcattctaagaaaatggacctgacagtaaatggggaacaactggatctggatcctggtcaaactttaatttattatgttgatgaaaaagcacctgaattctcaatgcagggtctaaaagctggtgttattgctgttattgtggttgtggtgatagcagttgttgctggaattgttgtgc

SEQ ID NO: 2843 - DNA, 492 bp, Homo sapiens
  misc_feature 441: n = A,T,C or G
caaaacctgaaggggccctccagaacaatgatgggctttatgatcctgactgcgatgagagcgggctctttaaggccaagcagtgcaacggcacctccacgtgctggtgtgtgaacactgctggggtcagaagaacagacaaggacactgaaataacctgctctgagcgagtgagaacctactggatcatcattgaactaaaacacaaagcaagagaaaaaccttatgatagtaaaagtttgcggactgcacttcagaaggagatcacaacgcgttatcaactggatccaaaatttatcacgagtattttgtatgagaataatgttatcactattgatctggttcaaaattcttctcaaaaaactcagaatgatgtggacatagctgatgtggcttattattttgaaaaagatgttaaaggtgaatccttgtttcattctnagaaaatggacctgacagtaaatggggaacaactggatctggatcctggtc

SEQ ID NO: 2844 - DNA, 57 bp, Homo sapiens
  misc_feature 23: n = A,T,C or G
ccgaggtacgaagtatttaatanatctaatcaaatatgttgattcatggctataata

SEQ ID NO: 2845 - DNA, 428 bp, Homo sapiens
  misc_feature 418: n = A,T,C or G
acacagctatttttatcaatttatgcttaaactgccttatgatttcaatgaaatttcttagcttttacttgttgaataattttttcaattgggaatcttttcataattcaaaatagttcctgaaaattaatgcatccttcaatgtcttctacttaagctgggtgcatttaaaatgcaacacaattctttgaaaggaggctatgacatttgagcataaagcctataagaaaaagaaatgtcttccctccccccatgcttcacagagactatatgaatgttccatactcttcatatttagcaacaggagttccttagagatcaaacagcagaaaacaggaggaacttaggccatcaatggacttgtaaaacagataaaactccaaatgtattttaagattccatcttctccacagatganaaagtgctga

SEQ ID NO: 2846 - DNA, 506 bp, Homo sapiens
  misc_feature 478: n = A,T,C or G
catttatgaaaagaggggaccagaagccaaagacttagtatattttcttttcctctgtcccttcccccataagcctccatttagttctttgttatttttgcttcttccaaagcacattgaaagagaaccagtttcaggtgtttagttgcagactcagtttgtcagactttaaagaataatatgctgccaaattttggccaaagtgttaatcttaggggagagctttctgtccttttggcactgagatatttattgtttatttatcagtgacagagttcactataaatggtgtttttttaatagaatataattatcggaagcagtgccttccataattatgacagttatactgtcggttttttttaaataaaagcagcatctgctaataaaacccaacagatactggaagttttgcatttatggtcaacacttaagggttttagaaaacagccgtcagccaaatgtaattgaataaagntgaagctaagatttagagatgaattaaa

SEQ ID NO: 2847 - DNA, 291 bp, Homo sapiens
  misc_feature 197, 233: n = A,T,C or G
acaggtcagagtcttcttttcttttctttttgagatggagtcttgctctgttgccagactggagtgcagtggtgcgatctgggctcactgcaatctccacctcccgggttcaagcgattctcctgcctcagcctcccgagtaactgggactacaggtgtgcgccaccaagcccagctcatttttgtatttttagtanagatggggtttcacgatgttggctaggatggtctcnatctctggtcagagtcttttctgtaaatatccttggtaaagaagcaattttagactgt

SEQ ID NO: 2848 - DNA, 272 bp, Homo sapiens
acctggagcggagggtcaggcacaggtaggaacggggctcacaggccgagcagagccccctctggcccctactcaattccttcctgcttgtcttttatggccacccgaaagcgctcctccagcagggacagctcactgatgaggtcggtgatggcgttggtaaaggcttcctgggggctgtagtccggcgtggtctgcactcggatgatgatcttgtgctccaaggggtgggggactttgtagccagcaaatagcacttgcgggtcttttag

SEQ ID NO: 2849 - DNA, 455 bp, Homo sapiens
acaggttgaaatagttctgtggctgtcctaagaaataatgggaaaagaatctctggatgtaagtttttctgttgaaactagagggttttttttttctgtttacatatacttttttttaatagcaatgtgtttttattaaacatgctgtgtgccacaggccagtgttgttggtgaaatatataaacatttatttaaagagaaaagttaccagtatctacacctcttaaaaaacattgattggtctaaaaaatatatagataacatcctaagttaacatatggcttcttaaaacttgggcacttttatttgtttttatcccaaattcatgttttaaggcctttaaagaatagtcagactgataaagaagtgctaacagataagctatagttggggaaatttgtgggtttttttaaataagaaatgtttatttttgtccttatatttaaacatgatgg

SEQ ID NO: 2850 - DNA, 183 bp, Homo sapiens
  misc_feature 62, 73, 86, 107, 123, 130, 136, 145, 163, 171, 173: n = A,T,C or G
acaagctttttttttttttttttttttttttttgaaaaagtcatggaggccatggggttggnttgaaaccagntttggggggttcnattccctccttttttgtctanattttatgtttacggnttcttcnaatgtntggtagggnggggggcatccatatagncactccangnttatggaggg

SEQ ID NO: 2851 - DNA, 360 bp, Homo sapiens
  misc_feature 348: n = A,T,C or G
aaaatgttggtttctataaaaagtttggatatactgtatctgaagaaaactacatgtgtcggaggtttctaaagtaaaaatcttgtaagaaaattgtcaaaggggctaatgctacaaggctacactcttcctagagttgaaatattttgttgctgcagccgagtgacctccataaatactggactgaaaaaacattgtaatactacaagtataatgacatttagaagattactttgggctggtgggacatgctgtgaatttagattacaaatgaatattataaaggggatgatttttaaccaaaggaatatatttttaacttgaatcttttcttgcattgtatttctntaaaagtttggc

SEQ ID NO: 2852 - DNA, 515 bp, Homo sapiens
acacctttgactacagctgcagaagtgttcctttagacaaagttgtgacccattttactctggataagggcagaaacggttcacattccattatttgtaaagttacctgctgttagctttcattatttttgctacactcattttatttgtatttaaatgttttaggcaacctaagaacaaatgtaaaagtaaagatgcaggaaaaatgaattgcttggtattcattacttcatgtatatcaagcacagcagtaaaacaaaaacccatgtatttaacttttttttaggatttttgcttttgtgattttttttttgatacttgcctaacatgcatgtgctgtaaaaatagttaacagggaaataacttgagatgatggctagctttgtttaatgtcttatgaaattttcatgaacaatccaagcataattgttaagaacacgtgtattaaattcatgtaagtggaataaaagttttatgaatggacttttcaactactttctctacagcttttcatg

SEQ ID NO: 2853 - DNA, 439 bp, Homo sapiens
actctgaggcttgtaggagggtaaaatagagacccagtaaaattgtaataagcagtgcttgaattatttggtttcggttgttttctattagactatggtgagctcaggtgattgatactcctgatgcgagtaatacggatgtgtttaggagtgggacttctaggggatttagcggggtgatgcctgttgggggccagtgccctcctaattggggggtaggggctaggctggagtggtaaaaggctcagaaaaatcctgcgaagaaaaaaacttctgaggtaataaataggattatcccgtatcgaaggcctttttggacaggtggtgtgtggtggccttggtatgtgctttctcgtgttacatcgcgccatcattggtatatggttagtgtgttggttagtaggcctagtatgaggagcgttatggagtggaagtgaaa

SEQ ID NO: 2854 - DNA, 171 bp, Homo sapiens
accttgcagagaataggcattgaaatattatttaaacaatcaaaccaaagatgttcttctatcttcagctgtcagtgatctaatgccctcatctctcttatcctcaggacccagaatggtatattccacataaaagatgctttgtttatcaaatgaatcaaaaagcacgcc

SEQ ID NO: 2855 - DNA, 375 bp, Homo sapiens
acaagaacaacaaacttttcctgaccggggagagctatgctggcatctacatccccaccctggccgtgctggtcatgcaggatcccagcatgaaccttcaggggctggctgtgggcaatggactctcctcctatgagcagaatgacaactccctggtctactttgcctactaccatggccttctggggaacaggctttggtcttctctccagacccactgctgctctcaaaacaagtgtagcttctatgacaacaaagacctggaatgcgtgaccaatcttcaggaagtggcccgcatcgtgggcaactctggcctcaacatctacaatctctatgccccgtgtgctggaggggtgcccagccattttaggtatg

SEQ ID NO: 2856 - DNA, 523 bp, Homo sapiens
acttcagttggtgcacaaaatactgtcatttactcaaagctggctgccaaatgtttggtgatgaaggcagaaatgaatggctcaaaacttgggagaagagcaaaacctgaaggggccctccagaacaatgatgggctttatgatcctgactgcgatgagagcgggctctttaaggccaagcagtgcaacggcacctccacgtgctggtgtgtgaacactgctggggtcagaagaacagacaaggacactgaaataacctgctctgagcgagtgagaacctactggatcatcattgaactaaaacacaaagcaagagaaaaaccttatgatagtaaaagtttgcggactgcacttcagaaggagatcacaacgcgttatcaactggatccaaaatttatcacgagtattttgtatgagaataatgttatcactattgatctggttcaaaattcttctcaaaaaactcagaatgatgtggacatagctgatgtggcttattattttgaaaaagatgttaaaggtg

SEQ ID NO: 2857 - DNA, 254 bp, Homo sapiens
  misc_feature 129: n = A,T,C or G
aaaaaatcagtatctatctttagaacaatgtaattataatgtgggaagtgtgcatgaatgagagagagtgtgtgtgtatctgtgtgtgtgtgcgcgtgtgtgtgtgtcttttaatagtttatgccagcnatctttgcttgaatgtttaacgatgccttcagtgtgatgctggccaatagatgattgcagtttaaaatgtcattattgtgcaggcttggataactaacattccatgatgtagcttgtttctgatg

SEQ ID NO: 2858 - DNA, 478 bp, Homo sapiens
acatattttggttgaagacaccagactgaagtaaacagctgtgcatccaatttattatagttttgtaagtaacaatatgtaatcaaacttctaggtgacttgagagtggaacctcctatatcattatttagcaccgtttgtgacagtaaccatttcagtgtattgtttattataccacttatatcaacttatttttcaccaggttaaaattttaatttctacaaaataacattctgaatcaagcacactgtatgttcagcaggttgaactatgaacactgtcatcaatgttcagttcaaaagcctgaaagtttagatctagaagctggtaaaaatgacaatatcaatcacattaggggaaccattgttgtcttcacttaatccatttagcactatttaaaataagcacaccaagttatatgactaatataacttgaaaattttttatactgaggggttggtgataactcttgaggatg

SEQ ID NO: 2859 - DNA, 360 bp, Homo sapiens
  misc_feature 120, 121, 352: n = A,T,C or G
ccacccccatggctcctggtaactacctgatcagcgtcaaatacggtgggcccaaccacatcgtgggcagtcccttcaaggccaaggtgacaggccagcgtctagttagccctggctcanncaacgagacctcatccatcctggtggagtcagtgaccaggtcgtctacagagacctgctatagcgccattcccaaggcatcctcggacgccagcaaggtgacctctaagggggcagggctctcaaaggcctttgtgggccagaagagttccttcctggtggactgcagcaaagctggctccaacatgctgctgatcggggtccatgggcccaccaccccctgcgaggaggnctccatga

SEQ ID NO: 2860 - DNA, 388 bp, Homo sapiens
  misc_feature 313, 337, 371, 374: n = A,T,C or G
acgagatctccgactagtctgggggcgctggcggcctgcgcagccacctcaagatcacagattctgctggccatattctctactccaaagaggatgcaaccaaggggaaatttgcctccaccactgaagattatgacatgtttgaagtgtgttttgagagcaagggaacagggcggatacctgaccaactcgtgatcctagacatgaagcatggagtggaggcgaaaaattacgaagagattgcaaaagttgagaagctcaaaccattagaggtagagctgcgacgcctagaagacctttcagaatctattgntaatgattttgcctacatgaaganagagaagaggagatgcgtgatacccacgagtgancanacactcgggtccta

SEQ ID NO: 2861 - DNA, 333 bp, Homo sapiens
acggagtcgagaagcacagagcctgagttgatacaagtgaagagtgagctgcccctggatccgctgccagtccccactgaggaaggaaaccccctcctcaaacactatcgggggcccgcaggggatgccacggtcgcctctgagaaggaatcagtcatgtaaaccccgggagggaccttccctgccctgctgggggtgctctttggacactggattatgaggaatggataaatggatgagctagggctctgggggtctgcctgcacactctggggagccaggggccccagcaccctccaggacaggagatctgggatgcctggctgctggagt

SEQ ID NO: 2862 - DNA, 465 bp, Homo sapiens
acagttttaagggtaattgcttttttatacagtatagataacctagagggatttcagggttaaacagttcataaagcaataaaacactgaaaaataaagcaagaaaaaggggtttgaagtaatattttaccaaaaaaaaaaaagaaaaagtgaacagtctgccagtgtttaatgtccatacattgtggaattcaacaatattgtgatgagagcaagtcatagcacagacactgagctttcaaaaggaaaagtagaagttacattagacatgtctattgcatcactgtaatacaaaaagttcctgttctacatacaaaagcaatttttttccgtaagaatcatttcctggggagaaataagtccataaaatatttcagaaacccatatgcattgggttttccaaaaacattatcttaaaatcagtgccttaaagtgctttcatgtggaaatcatgatggaaggcac

SEQ ID NO: 2863 - DNA, 495 bp, Homo sapiens
acataagtattttttaaaaatcaatcgaacagaaaggaatgcatgctgtttttcaatggcttagacatgctttttattcactgactagtattcacttttttacaacttgtatcaaaacaaatgatctttgtttttgtcacaggcaaaaacaggttgacactggtgggttggctttattaattaattttttttctattaggttttctttaataatgttaaatttctaaattatagcatatgttttagttaattctgaaatcagttacttcatttgttaatttatccctcatatcatgaatattgttttttaaatgttctatacaaatttgcatcacttcttttcttacagcttttgcagttaatatattctaaacttgaaaatgtggtatcaatcaataatagaagtatcactggaggatttatttagctttgtatttcttaattttagtcctagctactaaagtatgtaagccttaaagtttaaaatgtttttct

SEQ ID NO: 2864 - DNA, 594 bp, Homo sapiens
acaaggaatgaaagtgtcacgggtaaaaactctaaaaggttaatttctgtcaaatgcagtagatgatgaaagaaaggttggtattatcaggaaatgttttcttaagcttttcctttctcttacacctgccatgcctccccaaattgggcatttaattcatctttaaactggttgttctgttagtcgctaacttagtaagtgcttttcttatagaaccccttctgactgagcaatatgcctccttgtattataaaatctttctgataatgcattagaaggtttttttgtcgattagtaaaagtgctttccatgttactttattcagagctaataagtgctttccttagttttctagtaactaggtgtaaaaatcatgtgttgcagctttatagtttttaaaatattttagataattcttaaactatgaaccttcttaacatcactgtcttgccagattaccgacactgtcacttgaccaatactgaccctctttacctcgcccacgcggacacacgcctcctgtagtcgctttgcctattgatgttcctttgggtctgtgaggttctgtaaactgtgctagtgctgacgatgttc

SEQ ID NO: 2865 - DNA, 394 bp, Homo sapiens
ctggtacatacaaaaacagccatttaaaatctgatgattctgtggaattggtgtccctgttagcaatggcagagaccagcctggagcctagatctggtgcttcttctgtgctgtggtttaccccaaacctttaggttgtttattcattcagattagatagactggagccataaagttaatttgcacctagctttttggagaatagccatgattaactgctattcgtggtgggggtgggggggaaccctatgatttactatgcagatgaagagggtaggaactaaataaaggactttgtaagccaaagtggttgggctgctttgtcaaattccaccctttgcttggttccaacatggaatttctcctttaaagatttcaatatcccatcaaaagt

SEQ ID NO: 2866 - DNA, 165 bp, Homo sapiens
actaacccacgattctgagccctgagtatgcctggacattgatgctaacatgaccatgcttgggatgtctctagctggtctggggatagctggagcacttactcaggtggctggtgaaatgacacctcagaaggaatgagtgctatagagaggagagaggagtgt

SEQ ID NO: 2867 - DNA, 439 bp, Homo sapiens
acttttaaacattattcactactgtttttgaagtgagaaagtatcagccatttagcatttaagttggggtatttagagcctgtaatctaaatgctggctcaaatttattccccagctacttcttataccactattcttttaatgtttgcataatcataagcacctcaacacttgaatacataatctaaaaattatatagtaaagctggtagccttgaaaatgtcagtgtgatatctattatgtagataaatatatatagtggcctttcaggactgtcacagtaacactttatttacagagctaatgtttgtcctaaattttcaggaccctagaggagagctttatacaattaccgatgtgaatttctctaaagtgtatatttttgtgtccagttatattatttaaaaaagtgttactttgtaaaaattgtatataaagt

SEQ ID NO: 2868 - DNA, 225 bp, Homo sapiens
actattctttttatttgatagacaaggaagctgaagtgcagaacgattaatttgagtaatgtcatttagcttgcaagtgtcaaagatggcatttgaacccagacagcctggctccaccatctggactcttacagccttcaatccctaagagggggaaggaacttacatgacatcctactgggaatttgctagaaaccagatctctctgccctgcaggcaaaaggt

SEQ ID NO: 2869 - DNA, 588 bp, Homo sapiens
  misc_feature 540: n = A,T,C or G
acttctacacatctgcctaacttgggaatgaatgtgggagaaaatcgctgctgctgagatggactccagaagaagaaactgtttctccaggcgactttgaacccattttttggcagtgttcatattattaaactagtcaaaaatgctaaaataatttgggagaaaatattttttaagtagtgttatagtttcatgtttatcttttattatgttttgtgaagttgtgtcttttcactaattacctatactatgccaatatttccttatatctatccataacatttatactacatttgtaagagaatatgcacgtgaaacttaacactttataaggtaaaaatgaggtttccaagatttaataatctgatcaagttcttgttatttccaaatagaatggactcggtctgttaagggctaaggagaagaggaagataaggttaaaagttgttaatgaccaaacattctaaaagaaatgcaaaaaaaaagtttatttttcaagccttcgaactatttaaggaaagcaaaatcatttcctaaatncatatcatttgtgagaatttctcattaatatcctgaatcattcatttc

SEQ ID NO: 2870 - DNA, 409 bp, Homo sapiens
  misc_feature 395: n = A,T,C or G
acctgtgggtttattacctatgggtttatatcctcaaatacgacattctagtcaaagtcttggtaatataaccaatgttttcaaatgtattctgttatacaaagagcagatttttattgaacttgtgcaataactatattaccatacaatataaatattcatgaatagtttcccaagtctggagcgaccacatagggagaaaatgtaaatgtctcaatttttgttcacaaaagtatattttatcaaattgctgtaagctgtggatagcttaaaagaaaaaaagtttcctgaaatctgggaaacaagacatttaaagaatcagcaaaatttcaaataaaaaattatgaaaatattatcctcattagttcatttagtcccatgaaattaattatttnctctgcttgatctt

SEQ ID NO: 2871 - DNA, 496 bp, Homo sapiens
  misc_feature 408, 493, 495: n = A,T,C or G
acacttcagctgaaggtaagaccttaaaggaaaatgtccttaatactcaaattttattcttattgaaaaagcaaagaatatatttgatttcctactagtgataaaatagtcaatgttaaggttcattaacagtgtgaagattgtcatttttaacctgccactgaaattgagcctaattgagctttttttttttttttttaattagtttgcaggtcgaagtaagaaggaaaccaaatattctcttaaggctgtcgaagacatgttggaaacattgcagatcacccagtcttaaggtttcaaaaactctttgacattagatttcacaactgcacaattgaacttattggcctgtaacttatttactaaatgctcagtgctatttatatactacagtaattttctgttaanaaggcagttgtaaagaatgtgtttatataaacctaaaaatgccttttactgctaagtggggagatgggggaaatccatggaaganana

SEQ ID NO: 2872 - DNA, 453 bp, Homo sapiens
accaggctgcagtgcggtggtgccatctcggctcactgcaacctctgcctcccgggttcaggcgattgtcctgcctcagcctcccgagtagctgggattgcagccacatgccaccacgcccagctaatgtttgtgtttttggtagatacggggtttcatcatgttgcccaggatggtcttgatttcctgacctcgtgatccgcccatctcggcctcccagggtgctgggattacaggcatgagccaccagaaccggacatgctttgcttaaaagctaaatattttaggcttgtgtgccattaggctctgttacaactacttaattctgcttttgtaattctatagcacccattgataatacataaacaaatgagcatgaatgtgtctcagtaaaaatttgttcacataaacaggcagtccacccatgaagctatagcttgctgaccccttgtt

SEQ ID NO: 2873 - DNA, 357 bp, Homo sapiens
accctggacatctctgctgctcccactggagagtgagtctggagtccctggcactggggctttggtgagggctccatatacacccatggcctgagccaccatgctggtgacatcgccagggttggagggcagtaggatagtgttggagtccttggccagtttggagaacgcgctgacatactgctcggccacagtcagtgaagctgctgcatctccattatgttgtgtcagagctgcagccaggattcgaatagcttcagctttagccttggccttcgccagaactgcactggcctctcctgctgcctgatttatctgttcagccttttctgcttcggaggccaggatctgggcctg

SEQ ID NO: 2874 - DNA, 474 bp, Homo sapiens
gctcatctgactcattctttattctattttagttggtttgtatcttgcctaaggtgcgtagtccaactcttggtattaccctcctaatagtcatactagtagtcatactccctggtgtagtgtattctctaaaagctttaaatgtctgcatgcagccagccatcaaatagtgaatggtctctctttggctggaattacaaaactcagagaaatgtgtcatcaggagaacatcataacccatgaaggataaaagccccaaatggtggtaactgataatagcactaatgctttaagatttggtcacactctcacctaggtgagcgcattgagccagtggtgctaaatgctacatactccaactgaaatgttaaggaagaagatagatccaattaaaaaaaattaaaaccaatttaaaaaaaaaagaacacaggagattccagtctacttgagttagcataatacagaagtcccctc

SEQ ID NO: 2875 - DNA, 105 bp, Homo sapiens
actactgtagggggcattatttattaggaagcttaacaaggtaactacggcctgagtgcgtgagtgtaaggctgtgtttgtggtgggggtgtgtgtgtgtgtatc

SEQ ID NO: 2876 - DNA, 224 bp, Homo sapiens
  misc_feature 34, 219: n = A,T,C or G
acaaaaatatttaacagaactatgaaagatgcangaaaggagtctttcttcgtagcaaagtagtcgttgctttgcatggtttcttttgtatactcttcagggtttgtttatctgccccatgaataacacagcacctgtaggattatgtcggatgaaaaacagaaaaggtctgtctactataaaccagggaggcgatgatcttgcaatgagaattgcagntgttg

SEQ ID NO: 2877 - DNA, 501 bp, Homo sapiens
  misc_feature 448, 477: n = A,T,C or G
actagaattcagatatgtcagttttctgcaaaactcactcttgttcaagactagctaatttatttttttgcatcttagttatttttaaaaacaaattcttcaagtatgaagactaaattttgataactaatattatccttattgatcctattgatcttaaggtatttacatgtatgtggaaaaacaaaacacttaactagaattctctaataaggtttatggtttagcttaaagagcacctttgtatttttattatcagatggggcaacatattgtatgaagcatatgtagcacttcacagcatggttatcatgtaagctgcaggtagaagcaaagctgtaaagtagatttatcacacaatgactgcatacagacttcaaatatgtcaatagtttggtcatagaacctagaagccaaaagccacacagaagggcaagaatcccaattnaactcatgttatcatcattagtgatctgngttgtaaacatgagggtgtaagcc

SEQ ID NO: 2878 - DNA, 549 bp, Homo sapiens
  misc_feature 526: n = A,T,C or G
acagaacatcgtcagcactagcacagtttacagaacctcacagacccaaaggaacatcaataggcaaagcgactacaggaggcgtgtgtccgcgtgggcgaggtaaagagggtcagtattggtcaagtgacagtgtcggtaatctggcaagacagtgatgttaagaaggttcatagtttaagaattatctaaaatattttaaaaactataaagctgcaacacatgatttttacacctagttactagaaaactaaggaaagcacttattagctctgaataaagtaacatggaaagcacttttactaatcgacaaaaaaaccttctaatgcattatcagaaagattttataatacaaggaggcatattgctcagtcagaaggggttctataagaaaagcacttactaagttagcgactaacagaacaaccagtttaaagatgaattaaatgcccaatttggggaggcatggcaggtgtaagagaaaggaaaagcttaagaaacatttcctgataataccaacctttcnttcatcatctactgcatttgaca

SEQ ID NO: 2879 - DNA, 419 bp, Homo sapiens
accaagggatggaagaagtaaatatagctcaggtagcactttatactcaggcagatctcagccctctactgagtcccttagccaagcagtttctttcaaagaagccagcaggcgaaaagcagggactgccactgcatttcatatcacactgttaaaagttgtgttttgaaattttatgtttagttgcacaaattgggccaaagaaacattgccttgaggaagatacgattggaaaatcaagagtgtagaagaataaatactgttttactgtccaaagacatgtttatagtgctctgtaaatgttcctttcctttgtagtctctggcaagatgctttaggaagataaaagtttgaggagaacaaacaggaattctgaattaagcacagagttgaagtttatacccgtttcacatgctttt

SEQ ID NO: 2880 - DNA, 332 bp, Homo sapiens
cgaacgaccaagagggtgttcgactgctagagccgagcgaagcgatgcctaaatcaaaggaacttgtttcttcaagctcttctggcagtgattctgacagtgaggttgacaaaaaggtgactactgctgcaccaagtcattttggtgatactcaacaatattgtccatatcccattctgaaggatagtaaaagttaaagaggaaaaagcaagttgctccagaaaaacctgtaaagaaacaaaagacaggtgagacttcgagagccctgtcatcttctaaacagagcagcagcagcagagatgataacatgtttcagattgggaaaatgaggt

SEQ ID NO: 2881 - DNA, 222 bp, Homo sapiens
caggtcaccgcccggcgtccagatttggcaattcttcgctgaagtcatcatgagctttttccaactcctgatgaaaaggaaggaactcattcccttggtggtgttcatgactgtggcggcgggtggagcctcatctttcgctgtgtattctctttggaaaaccgatgtgatccttgatcgaaaaaaaaatccagaaccttgggaaactgtggaccctactgt

SEQ ID NO: 2882 - DNA, 457 bp, Homo sapiens
acgtcctggaggactctattgtggacccacagaatcagaccatgactaccttcacctggaacatcaaccacgcccggctgatggtggtggaggaacgatgtgtttactgtgtgaactctgacaacagtggctggactgaaatccgccgggaagcctgggtctcctctagcttatttggtgtctccagagctgtccaggaatttggtcttgcccggttcaaaagcaacgtgaccaagactatgaagggttttgaatatatcttggctaagctgcaaggcgaggccccttccaaaacacttgttgagacagccaaggaagccaaggagaaggcaaaggagacggcactggcagctacagagaaggccaaggacctcgccagcaggcggccaccaagaagcagcagcagcagcaacagtttgtgtagccagtctaccaccaccacagcaccccagacaag

SEQ ID NO: 2883 - DNA, 268 bp, Homo sapiens
accttgagaaaatgacagtgagtggaggcctaacagtcatgtgttcaggaggttactgtgataatccaactgagcaataaggagacctgaattaaggttttggcactagggatggaaaggagggggtggatgtaagagctatttggaaggtaaaatcaacaactattgataattgatagtgagagagaaagagagagaggtgtctaggaactgagcttaaccaagggcattcatttgttattgtgctgtatcttgcatttgctaacgt

SEQ ID NO: 2884 - DNA, 364 bp, Homo sapiens
  misc_feature 338: n = A,T,C or G
acaccagccattccagacccacagtcactctgctctttaattcacagaactgctgaaaaagtagacatttctatctaaaagtagaaaaaaaggtttgtatagaaggtatttctgttatacaagtatattacacagcttggggtagtaacaggtccgaaaagctcttctcaaccactgatactttaagctaaaataggagagaaaacaaacaagcaagcaaagaggttaatctaattacaggaatttaacagtcacgaatatcacaacttaatttgcaaattcaggtaacaatgacttggattcagaagcactcataaagcgggatgaaaccttaagtncatgagctgacagggtaaggcaaatt

SEQ ID NO: 2885 - DNA, 519 bp, Homo sapiens
actaggttcttaggaaacaacagaattcctcaaatgcctaaaacaaagaaaatagaaacccagaaaacaaaacaaaataaaacaaaaccatcagaactgtgagtggaaactaaggtgatgatctgggagcaatacactaaaatcttgtgtcgagacctatatgaaggctggcagtggagctaaacctggacatgctgaagacaagggagctgaaccagggctcctacatgaagcagggataactgatggcagtaaatgtggtctcaaattgcagatggtctggaggaaaatttcccaaatttagagcctcaggattcccaaagatcctccaaatatgagctcacaatcaaagatcagagacgttgaaaaataaaaaacaccttaagtgggcagcataaaaaacagctaatttagaaccccaaaggcttcagatgtcagaatattagagacttatgataataagcaatatttgcagagtatttgtatgtgccagacactattgtaagtgcttcatcatgt

SEQ ID NO: 2886 - DNA, 436 bp, Homo sapiens
gaaaaagatgttaaaggtgaatccttgtttcattctaagaaaatggacctgacagtaaatggggaacaactggatctggatcctggtcaaactttaatttattatgttgatgaaaaagcacctgaattctcaatgcagggtctaaaagctggtgttattgctgttattgtggttgtggtgatagcagttgttgctggaattgttgtgctggttatttccagaaagaagagaatggcaaagtatgagaaggctgagataaaggagatgggtgagatgcatagggaactcaatgcataactatataatttgaagattatagaagaagggaaatagcaaatggacacaaattacaaatgtgtgtgcgtgggacgaagacatctttgaaggtcatgagtttgttagtttaacatcatatatttgtaatagtgaaacctgt

SEQ ID NO: 2887 - DNA, 462 bp, Homo sapiens
  misc_feature 447: n = A,T,C or G
acgatcgaagggactatgtcttcattgaattttgtgttgaagacagtagggatgttaatgtaaattttgaaaaatccaaacttacattcagttgtctcggaggaagtgataattttaagcatttaaatgaaattgatctttttcactgtattgatccaaatgattccaagcataaaagaacggacagatcaattttatgttgtttacgaaaaggagaatctggccagtcatggccaaggttaacaaaagaaagggcaaagcttaattggcttagtgtcgacttcaataattggaaagactgggaagatgattcagatgaagacatgtctaattttgatcgtttctctgagatgatgaacaacatgggtggtgatgaggatgtagatttaccagaagtagatggagcagatgatgattcacaagacagtgatgatgaaaaaatgccanatctggagtaaggaa

SEQ ID NO: 2888 - DNA, 499 bp, Homo sapiens
acagggcaaaaaaaaaaaaatctaatgattcacagacagatctggagcctctcttcattctcagtaattgctagtcccaagaactagaattgcaaatgggcacaacctatatccttcctgtggaagaggaggccactctcttgagctgaagttccagaagagcagttaatgttcaagagaaattgaactcaactcagcaacaaaggactctattttgaagagcaacatatcacaaagctaaatgtgattgtgccaaacacattaggtgcttatttggggtcatgctaggcctttatcaagtaactggaaaacttttcttgcagccacaatctcaatgtcgttagtaggaagataagaggggagaaaaagctgtagaacaaatgtttggggttaccattgaaaatctaatgtctgcaatatttttctcctcacaacttggaaacgttcccagttcattttcagtcctgttgtgagcacagttctgaagggtttattattg

SEQ ID NO: 2889 - DNA, 350 bp, Homo sapiens
  misc_feature 195, 329: n = A,T,C or G
caggaaaaatgcgtctgagagcaactctttttaaaaacctgccctgttgtatataactgtgtctgtttcaccgtgtgacctcccaagggggtgggaacttgatataaacgtttaaaggggccacgatttgcccgagggttactcctttgctctcaccttgtatggatgaggagatgaagccatttcttatcctgnagatgtgaagcactttcagttttcagcgatgttggaatgtagcatcagaagctcgttccttcacactcagtggcgtctgtgcttgtccacatgcgctgggcgtctgggaccttgaatgcctgccctggttgtgnggactccttaatgccaatcat

SEQ ID NO: 2890 - DNA, 516 bp, Homo sapiens
  misc_feature 494: n = A,T,C or G
acacttcagctgaaggtaagaccttaaaggaaaatgtccttaatactcaaattttattcttattgaaaaagcaaagaatatatttgatttcctactagtgataaaatagtcaatgttaaggttcattaacagtgtgaagattgtcatttttaacctgccactgaaattgagcctaattgagcttttttttttttttttttaattagtttgcaggtcgaagtaagaaggaaaccaaatattctcttaaggctgtcgaagacatgttggaaacattgcagatcacccagtcttaaggtttcaaaaactctttgacattagatttcacaactgcacaattgaacttattggcctgtaacttatttactaaatgctcagtgctatttatatactacagtaattttctgttaagaaggcagttgtaaagaatgtgtttatataaacctaaaaatgccttttactgctaagtggggagatgggggaaatccatggaaganagatttaagacttattgattgt

SEQ ID NO: 2891 - DNA, 423 bp, Homo sapiens
acacatcccatcttcaaatttaaaatcatattgtcagttgtccaaagcagcttgaatttaaagtttgtgctataaaattgtgcaaatatgttaaggattgagacccaccaatgcactactgtaatatttcgcttcctaaatttcttccacctacagataatagacaacaagtctgagaaactaaggctaaccaaacttagatataaatcctaccaataaaatttttcagttttaagttttacagtttgatttaaaaacaaaacagaaacaaatttcaaaataaatcacatcttctcttaaaacttggcaaacccttccctaactgtccaagtatgagcatacactgccactggctttagatactccaattaaatgcactactctttcactggtctgaatgaagtatggtgaaacaagtacctc

SEQ ID NO: 2892 - DNA, 471 bp, Homo sapiens
  misc_feature 396, 404: n = A,T,C or G
acaatatctcatctatatgccagcagtttaaatgctatttgttcagtctcgaacattttcaaacaaatgacagttatcacttaactaacacaatctttctattatttcactgacaaaagaggcagtttcctgcagtggaaagaggagatggcttggagttagaagagctagattctgaacccagctctactcattctgagccttagtttccttatgaggatcaagtgagacgaaagtgctttgtaaaggagtaataaccacaagaaataatattctagagtccatctcttccatcaactgatggatccctaatttgcacatgtattttgcaagtaaaatcttaccttttaaagtaaatatatgatgcatattcaccacatgcagctgaaatgtgcnagttgggntacatagatgggaaaagagtatgtattaaaaagcctttaagacttgtatactcttgatgtgcttgat

SEQ ID NO: 2893 - DNA, 567 bp, Homo sapiens
acagtggtccttttcagagttggacttctagactcacctgttctcactccctgttttaattcaacccagccatgcaatgccaaataatagaattgctccctaccagctgaacagggaggagtctgtgcagtttctgacacttgttgttgaacatggctaaatacaatgggtatcgctgagactaagttgtagaaattaacaaatgtgctgcttggttaaaatggctacactcatctgactcattctttattctattttagttggtttgtatcttgcctaaggtgcgtagtccaactcttggtattaccctcctaatagtcatactagtagtcatactccctggtgtagtgtattctctaaaagcttaaatgtctgcatgcagccagccatcaaatagtgaatggtctctctttggctggaattacaaaactcagagaaatgtgtcatcaggagaacatcataacccatgaaggataaaagccccaaatggtggtaactgataatagcactaatgctttaagatttggtcacactctcacctaggtgagcgcattgagccagtggtgc

SEQ ID NO: 2894 - DNA, 362 bp, Homo sapiens
actataagaacacattaattcaatggaaatacactttgctaatattttaatggtatagatctgctaatgaattctcttaaaaacatactgtattctgttgctgtgtgtttcattttaaattgagcattaagggaatgcagcatttaaatcagaactctgccaatgcttttatctagaggcgtgttgccatttttgtcttatatgaaatttctgtcccaagaaaggcaggattacatctttttttttttttttagcagtttgagttggtgtagtgtattcttggttatcagaatactcatatagctttgggattttgaattggtaaatattcatgatgtgtgaaaaatcatgatacatactgt

SEQ ID NO: 2895 - DNA, 508 bp, Homo sapiens
actggttggagctctgagtgagtcaaaagaacaggaattcggaaaactcttcagtaaatatctagcggatcctagtaatctctttgtggtttcttctgatttctgccattggggtcaaaggttccgttacagttactatgatgaatcccagggggagatttatagatccattgaacatctagataaaatgggtatgagtattatagaacaattagaccctgtatcttttagcaattacttgaagaaataccataatactatatgtggaagacatcccattggggtgttattaaatgctatcacagagctccagaagaatggaatgaatatgagtttttcgtttttgaattatgcccagtcgagccagtgtagaaactggcaagacagttcagtgagttatgcagctggagcactcacggtccactgaagctctgaatcctcagggatgccacctgcacattctcatactctgtccggggtcccagcctagcctttaccacgatactgg

SEQ ID NO: 2896 - DNA, 478 bp, Homo sapiens
  misc_feature 43, 60, 65, 74, 94, 169, 173, 222, 255, 264, 348, 355, 360,377, 384, 417, 426, 437, 470: n = A,T,C or G
acaagcttttttttttttttttttttttttttttaaaaaaaanaataacttttttgcctntttanattacatanaagcattgtagtcttggtanaaccagtatttttgttgtttatttataaggtaattgtgtgtggggaaaagtgcagtatttacctgttgaattcancatnttgagagcacaagggaaaaaataagaacctacgaatatttttgaggcanataatgatctagtttgactttctagttagtggngttttgaanagggtattttattgttttttaaaaaaaggttcttaaacattatttgaaatagttaatataaatacataattgcatttgctctgnttattgnaatgnattctaaattaatgcanaaccatntggaaaatttcattaaaatctatccccaaatgngctttctgnatccttccttntacctattattctgatttttaaaaatgcagttnatgtacct

SEQ ID NO: 2897 - DNA, 388 bp, Homo sapiens
gtcaggtctctgacattgacagagcctggacgttggaggaagccccaggacgttggaggggtaaagtaaaagtccacagttaccgtgagagaaaaaagagggagaaagcagtgcagccaaactcggaagaaaagagaggaggaaaaggactcgactttcacattggaacaaccttctttccagtgctaaaggatctctgatctggggaacaacaccctggacatggctccagagatcaacttgccgggcccaatgagcctcattgataacactaaagggcagctggtggtgaatccagaagctctgaagatcctatctgcaattacgcagcctgtggtggtggtggcgattgtgggcctctatcgcacaggcaaatcctacctgatga

SEQ ID NO: 2898 - DNA, 409 bp, Homo sapiens
  misc_feature 33, 43, 51, 58, 91, 98, 110, 124, 129, 131, 167, 187, 217,234, 236, 287, 335, 344, 364, 402, 406: n = A,T,C or G
ttttttttttttttttttttttttttttggggnaaatatgtanagggagtntagggcntgtgactagtatgttgagtcctgtaagtagganagtgatntttgatcagganaacgtggttactantacananagttctcccagtaggttaatagtggggggtaaggcnaggttagcgaggcttgctanaagtcatcaaaaagctattagtgggagcanagtttgaagtccttgananaggattatgatgcgactgtgagtgcgttcgtagtttgagtttgctaggcanaatagtaatgaggatgtaagtccgtgggcgattatgaaaatgactgcnccggtgaancttcagggggtttggatganaatggctgttactaccagggctatgtggctgattgaanaatntgc

SEQ ID NO: 2899 - DNA, 256 bp, Homo sapiens
  misc_feature 35, 56, 149, 194: n = A,T,C or G
acaagcttttttttttttttttttttttttttggnttctacaaattattttattanaatgtcagactcaaaagaactaccaggaacatgcctgaaaatgctatatatgatttatgcttgacccatgacacctgctgtcactggatccanagtgagcaagggaaaggaagtggaggtaggcggggacagcaccanccctggctggccagacctgaggcccacagacctggtccccacaaccaggattcctacaatgt

SEQ ID NO: 2900 - DNA, 339 bp, Homo sapiens
accaaatccagggacaatttttgtccttgacaggacatctagcaatgtctggagacatttttgtttgttacacctgggttggtgctactagcagcagatagatggatggccaagatacagaggccaaggatgctgctaaatgccctgcaatgcacaagacagccctccaccaacaagtaattatcccacccaaaatgtcaatagtgctgctgttgagaaactctgcacaaatgtaatcgctgttttagttgtactttttagtttggggagatcacagtctacagactcatttacttatattaaacaagattaacctcattcaaaacttactgcagttta

SEQ ID NO: 2901 - DNA, 408 bp, Homo sapiens
acttctacacatctgcctaacttgggaatgaatgtgggagaaaatcgctgctgctgagatggactccagaagaagaaactgtttctccaggcgactttgaacccattttttggcagtgttcatattattaaactagtcaaaaatgctaaaataatttgggagaaaatattttttaagtagtgttatagtttcatgtttatcttttattatgttttgtgaagttgtgtcttttcactaattacctatactatgccaatatttccttatatctatccataacatttatactacatttgtaagagaatatgcacgtgaaacttaacactttataaggtaaaaatgaggtttccaagatttaataatctgatcaagttcttgttatttccaaatagaatggactcggtctgt

SEQ ID NO: 2902 - DNA, 262 bp, Homo sapiens
accattggtggccaattgatttgatggtaagggagggatcgttgacctcgtctgttatgtaaaggatgcgtagggatgggagggcgatgaggactaggatgatggcgggcaggatagttcagacggtttctatttcctgagcgtctgagatgttagtattagttagttttgttgtgagtgttaggaaaagggcatacaggactaggaagcagataaggaaaatgattatgagggcgtgatcatgaaaggtgataagctcttc

SEQ ID NO: 2903 - DNA, 458 bp, Homo sapiens
acaagtgccctattgccatggaagaggctgatgacactgtggcacccagctcgacgttctgcaaggtctacacactgacccccttcctagccaataaccgagagaagcggggcctcgccttggacgggaagctcaagcacgaagacacgaacttggcctctagcaccctgttgagggaaggtgccaaccgtgagatcctggggatcattgtttcctacaaagtgaaagtgaagctggtggtgtctcggggcggcgacgtggccgtggaactgcccttcaccctaatgcaccccaagcccaaagaggaacccccgcatcgggaagttccagagaacgagacgccagtagataccaatctcatagaacttgacacaaatgatgacgacattgtatttgaggactttgctcgccagagactgaaaggcatgaaggatgacaaggaggaagaggaggatggt

SEQ ID NO: 2904 - DNA, 398 bp, Homo sapiens
tttttctagtgaagttaaacaaacattgggataccgacacagacaacttgagacagtttttttaatcttttaatcagtgtagctatgtgctgctgctgctcaagagctggatccatacaggttgtgtgtcatctgtcctcttgaggttcaggagattctaaattgaatattccacggtttgggacagcatccggaagttttccctatgactttatattttgtattatgtcaaatgttatggcagggcccaaatagcatagccacaagtttggtttatgtgggcataaaattctaaccaaaccccagacatagggagtcatttggagaaagcctgtatgtggtgttttaacctaataaagttgatgagagagaaggggagaggaagcgaacataaagcg

SEQ ID NO: 2905 - DNA, 404 bp, Homo sapiens
cacccagaggagtcgctggtgattgggagctcaaccctgttcagtgctctgctcatcaagtgtctggagaaggaggttgcagcattgtgcagatacacaccccgcaggaacatccctccttattttgtggctttggtgccacaggaagaagagttggatgaccagaaaattcaggtgactcctccaggcttccagctggtctttttaccctttgctgatgataaaaggaagatgccctttactgaaaaaatcatggcaactccagagcaggtgggcaagatgaaggctatcgttgagaagcttcgcttcacatacagaagtgacagctttgagaaccccgtgctgcagcagcacttcaagaacctggaggccttggccttggatttgatggagccggaacaagc

SEQ ID NO: 2906 - DNA, 242 bp, Homo sapiens
acaccaaggcgaccacagcagctgcaacctcagcaatgaagatgaggaggaggatgaagaagaaaaagatgagcaaattgaagaggatcatcatggtcttaatgaagctgaagcactgcatggtggctcctgttcagggctcttggcagtgagttctgaaagagggaactgctgaggctccacaaaggacaaaacagctcccgggtgttgccactgagtgggcaggcagagggacgcctggc

SEQ ID NO: 2907 - DNA, 429 bp, Homo sapiens
actttgcctacggcagcaacctgttgacagagaggatccacctccgaaacccctcggcggcgttcttctgtgtggcccgcctgcaggattttaagcttgactttggcaattcccaaggcaaaacaagtcaaacttggcatggagggatagccaccatttttcagagtcctggcgatgaagtgtggggagtagtatggaaaatgaacaaaagcaatttaaattctctggatgagcaagaaggggttaaaagtggaatgtatgttgtaatagaagttaaagttgcaactcaagaaggaaaagaaataacctgtcgaagttatctgatgacaaattacgaaagtgctcccccatccccacagtataaaaagattatttgcatgggtgcaaaagaaaatggtttgtcgctggagtatcaagagaagttaaaag

SEQ ID NO: 2908 - DNA, 165 bp, Homo sapiens
  misc_feature 131: n = A,T,C or G
acaggtcagagtcttcttttcttttctttttgagatggagtcttgctctgttgccagactggagtgcagtggtgcgatctgggctcactgcaatctccacctcccgggttcaagcgattctcctgcctcancctcccgagtaactgggactacaggtgcgcgcca

SEQ ID NO: 2909 - DNA, 525 bp, Homo sapiens
  misc_feature 426: n = A,T,C or G
actcaatattataaaaacctcaaataattgacttgattttacacaacatccttcccttttctacaagttaatttttttacaaatcatttgggttatctcctaaataggttatattttattgcttctagaaacaatgtttcaaaatatatgtgcattatcagtaataatttgtataaatatttcccacaacaattttcataattttcaaagactaatttcttgactgaagatattttgctagggaagtgaaactttaaaattttgtagattttaaaaaatattgttgaatggtgtcatgcaaaggatttatatagtgtgctcccactaactgtgtacagatcaggacacatatttttagacatctaagtctgtagcttaaatggaggttactcttccatcatctagaattgtttacttagtaattgntgtttcttttattattatagacttactatcagttttattttgccaagtatgcaacaggtatatcactagtatatgaaaatgtaaatatcacttgtgtac

SEQ ID NO: 2910 - DNA, 560 bp, Homo sapiens
acaatcacggctcaatgtaggcttaacctcctgggctcaggtgtatgtcactatgcccggctactttttgtattttttggtagagacggcttcgccacgttgcccaggctgcaagcgatatgcctaggctcaagcgatctgcccaccgcaacttccggaagtgctgagattacaggtgtgagccactgcacccagcctttgttttattttttattttttgagaggtatgattctttctagagattttttctcatggctactattagatcaggaatgggtgattggagattattagattctaggttaacttctaccactttaccctaatacataaaactttttcctaaataaatgatggaaggaataatacttggttacctggcattatttttcagtaagaaaaaagctttactaaccactacatttatggaaatttgtaggggtaagtattttataggtcataaaaaacaccataatataacgaatctcattttctttaaatgtgaattaaatcctaacagtcatctttataaaatgaccataggctaaaatcttacgtg

SEQ ID NO: 2911 - DNA, 482 bp, Homo sapiens
gtccgggggcctggccaccgggatagccgggggtctggcaggaatgggaggcatccagaacgagaaggagaccatgcaaagcctgaacgaccgcctggcctcttacctggacagagtgaggagcctggagaccgagaaccggaggctggagagcaaaatccgggagcacttggagaagaagggaccccaggtcagagactggagccattacttcaagatcatcgaggacctgagggctcagatcttcgcaaatactgtggacaatgcccgcatcgttctgcagattgacaatgcccgtcttgctgctgatgactttagagtcaagtatgagacagagctggccatgcgccagtctgtggagaacgacatccatgggctccgcaaggtcattgatgacaccaatatcacacgactgcagctggagacagagatcgaggctctcaaggaggagctgctcttcatgaagaagaaccacgaagagg

SEQ ID NO: 2912 - DNA, 396 bp, Homo sapiens
  misc_feature 362: n = A,T,C or G
acctgttgttatgtcagaattaagtgatcaaatgattttcatggagaggataaaaaatatgatatatatgctttattttgacttttggtttcaagcatatgatctgaagaagtgggaccagttttatagtgaagttctaggaagacccactacattatttgagacaatggggaaagctgaaatgtggctcattcgaacctattgggattttgaatttcctcgcccattcttaccaaatgttgattttgttggaggacttcactgtaaaccagccaaacccttgcctaaggaaatggaagagtttgtgcagagctctggagaaaatggtattgtggtgttttctctggggtcgatgatcagtnacatgtcagaagaaagtgccaacatgattgcatc

SEQ ID NO: 2913 - DNA, 246 bp, Homo sapiens
  misc_feature 123: n = A,T,C or G
acccgcccccacagcctcagcctcaacgggggcagccgggagactgggctctgacctaggcttcttgtcacactgaacacatccagccacaggcaccagctggttgggaccagcagcccccancatcctcttgcactggctggcacaaaaagaaacctgctgtataccccccaaagtgtccctttccctcctacctctggggtctcttgctgcttgcctctgctgctctggactgggagagcttct

SEQ ID NO: 2914 - DNA, 222 bp, Homo sapiens
  misc_feature 129, 156, 218: n = A,T,C or G
acccatattgctaatgctaggatcaagataccacatagccagaacaagaagttgaaggtaaacatagaatattttatacaggcactcacacctgccatttcggaaaaggattaggaatccagatgccgngaatttaactattcgttacaggcttgncctgcaatatgctctggagcaacttgcctgcagagatttctgtatccacggcttcagagcanaaag

SEQ ID NO: 2915 - DNA, 501 bp, Homo sapiens
acagtggtccttttcagagttggacttctagactcacctgttctcactccctgttttaattcaacccagccatgcaatgccaaataatagaattgctccctaccagctgaacagggaggagtctgtgcagtttctgacacttgttgttgaacatggctaaatacaatgggtatcgctgagactaagttgtagaaattaacaaatgtgctgcttggttaaaatggctacactcatctgactcattctttattctattttagttggtttgtatcttgcctaaggtgcgtagtccaactcttggtattaccctcctaatagtcatactagtagtcatactccctggtgtagtgtattctctaaaagctttaaatgtctgcatgcagccagccatcaaatagtgaatggtctctctttggctggaattacaaaactcagagaaatgtgtcatcaggagaacatcataacccatgaaggataaaagccccaaatggtggtaactga

SEQ ID NO: 2916 - DNA, 294 bp, Homo sapiens
  misc_feature 291: n = A,T,C or G
acggccagggctattggttgaatgagtaggctgatggtttcgataataactagtatggggataaggggtgtaggtgtgccttgtggtaagaagtgggctagggcatttttaatcttagagcgaaagcctataatcactgcgcccgctcataaggggatggtcatggctaggtttatagatagttgggtggttggtgtaaatgagtgaggcaggagtccgaggaggttagttgtggcaataaaaatgattaaggatactagtataagagatcaggttcgtcctttatgttgngta

SEQ ID NO: 2917 - DNA, 391 bp, Homo sapiens
actctgtgaatggtgagaggctgggcacctacatgggccataccagagctgtgtggtgtgtggacgctgactgggacaccaagcatgtcctcactggctcagctgacaacagctgtcgtctctgggactgtgaaacaggaaagcagctggcccttctcaagaccaattcggctgtccggacctgcggttttgactttgggggcaacatcatcatgttctccacggacaagcagatgggctaccagtgctttgtgagcttttttgacctgcgggatccgagccagattgacaacaatgagccctacatgaagatcccttgcaatgactctaaaatcaccagtgctgtttggggacccctgggggagtgcatcatcgctggccatgagagtgg

SEQ ID NO: 2918 - DNA, 425 bp, Homo sapiens
ctggatccaaaatttatcacgagtattttgtatgagaataatgttatcactattgatctggttcaaaattcttctcaaaaaactcagaatgatgtggacatagctgatgtggcttattattttgaaaaagatgttaaaggtgaatccttgtttcattctaagaaaatggacctgacagtaaatggggaacaactggatctggatcctggtcaaactttaatttattatgttgatgaaaaagcacctgaattctcaatgcagggtctaaaagctggtgttattgctgttattgtggttgtggtgatagcagttgttgctggaattgttgtgctggttatttccagaaagaagagaatggcaaagtatgagaaggctgagataaaggagatgggtgagatgcatagggaactcaatgcataactata

SEQ ID NO: 2919 - DNA, 410 bp, Homo sapiens
  misc_feature 408: n = A,T,C or G
acctgccccttgatgaggcccaccccacgggtggttgtaccaacccttacggcaagtccaagttcttcatcgaggaaatgatccgggacctgtgccaggcagacaagacttggaacgcagtgctgctgcgctatttcaaccccacaggtgcccatgcctctggctgcattggtgaggatccccagggcatacccaacaacctcatgccttatgtctcccaggtggcgatcgggcgacgggaggccctgaatgtctttggcaatgactatgacacagaggatggcacaggtgtccgggattacatccatgtcgtggatctggccaagggccacattgcagccttaaggaagctgaaagaacagtgtggctgccggatctacaacctgggcacgggcacaggctattcantg

SEQ ID NO: 2920 - DNA, 296 bp, Homo sapiens
acaggtaagccctggctgcctccacccactcccagggagaccaaaagccttcatacatctcaagttgggggacaaaaaagggggaagggggggcacgaaggctcatcattcaaaataaaacaaaataaaaaagtattaaggcgaagattaaaaaaattttgcattacataatttacacgaaggcaatgctatcacctcccctgtgtggacttgggagaggactgggccattctccttagagagaagtggggtggcttttaggatggcaagggacttcctgtaacaatgcatctcat

SEQ ID NO: 2921 - DNA, 562 bp, Homo sapiens
acaccaacaaatgaaaaatgtaactttaattgacataagataaaatgttactctttacactttaagttaaaaactataggacactttagaagcagacaatacaaggtgctttagttctagacttcacaacagaacactattccattagtcgcttgagagtccataacctctgaggactgctcaatggctttttaaagtcaacctcaaatataaaaagcactttaagtttaccagtcaaaatctagttatatcagttacatcttacgttacaacatactacttgagaaaactgacttttaaaaaagactgcattgttgactaatttcaaagattgctgctcttaaaagtaaaaatgcaccactttcaaatctttcaacatgttttaagatatcatattttgtgaatccattactttatatattccaaaccttcagcaaaataaaattaaaatgggttttaaacctaatatctctaaagaaatgggtctgcatgtctgtgaagtggctgtccaccgcacagcaatatgtttgtttcaactgtgaaacatcactacaaaatccat

SEQ ID NO: 2922 - DNA, 303 bp, Homo sapiens
accgtagccaatgagatttatccgagacgcgattattgctaattggaaattttcccaataccccaccgtgatgacttgaaatataatcagcgctggcaatttttgacagtctctacggagactgaataagaaaaaagaaaagaaaagaaattagctgggtgcgatggcttatgcctgtaatcccggcactttgggaggctgaggcaagcggatcacttaatgtcaggagttcaagaccagcctggccaacatggtgaaaccccgtctctgctaaaaataaaaaaactagctgggcgtggtagt

SEQ ID NO: 2923 - DNA, 372 bp, Homo sapiens
  misc_feature 73, 91, 98, 102, 104, 110, 120, 127, 131, 177, 186, 237,244, 272, 289, 296, 309, 318, 324, 327, 336, 348, 355, 371: n = A,T,C or G
acaagctttttttttttttttttttttttttttttttttcctgattacaaaagcaaaacctcattttttggtntttgaaaaccatggagtntgacttntaanancaaacnttaacatcanatttgtntgtntcactacaaaaagaacccatcactgatgtaagacctactcatgatnctgaagtanattttttaaattaaaaaataaaagtagtcatttaaaatggaggaattgtanatgagtntggaaaaatccattcacaaagttcactntttgcattttctaaaanaattttntgtaataaaatanaaaactaangatttntanagatgtgcntaaactcaaaanaggaatntggaagggaaaactgng

SEQ ID NO: 2924 - DNA, 205 bp, Homo sapiens
acatctctacaatagaatactactcagcaatgaaaaggaacaaactgctgatacacacaacagcatggatgaattacaaaggcattatggtgagtaaaagaggccagtctcaaaagagtatatttagtaggaccaaaactggatttggtagaaatcacatcagtggttgcttctaggagctaggggagacgaagtggaagggggt

SEQ ID NO: 2925 - DNA, 81 bp, Homo sapiens
  misc_feature 66, 68, 75: n = A,T,C or G
taaaaattgaaaaataaaaaccataaacatttgcaccacttgtggcttttaaacttccctctgtgnangatattnaaaagc

SEQ ID NO: 2926 - DNA, 412 bp, Homo sapiens
acaatttcatctcaaaatgatttcattcacagcatacacagaaatctaaaagagacatggtatttacaagatttaataagtttttgctgctttaatgaagaaactgatcaattcttttacagtagggaaagaaacatggacattggatatcataaataattcagaattgttcagtctcaaagtaacttttcatggctttagaattaaaattgagtcatcattctattaatctctgaatgcccaagccatgcagaatctacttgtattaaatatttggggatgcaaataatacaggaaaaaaagtctggtgaatgtgaaaacgtcatcagaattaacctttacaataggcaaatactgttaattctttcgaaaagatacagtagtggtgcaacacagacagtgcccaatttat

SEQ ID NO: 2927 - DNA, 172 bp, Homo sapiens
acaaagtttgtaaaatatcagaggatatatatatattgtttctacgacatggtattgcatttatatctttttactacagtgatctgtgacagcagcagcttcatgttgtattttttttactgaaattgtaaaatatccatcttaaagacatcaactattctaaaaattgtgt

SEQ ID NO: 2928 - DNA, 283 bp, Homo sapiens
  misc_feature 265, 277: n = A,T,C or G
acattagcaccataacatgcgtctttaaagccttcccaaatattagtaatcttgaccagcaatgacaagaaaaaagaggagcacctttacaagcagttgatatccaatattaaaataattgtggctttaaaaatatttctttaaattcttgcattacacttttctttttaaaccaatcttccaggagattaatcaatgaaatttataagttttatcaacgtataaaatttttttcatcttctgggactcatagaatacaatctgngtttctgaccanttgagg

SEQ ID NO: 2929 - DNA, 384 bp, Homo sapiens
  misc_feature 374, 378, 379: n = A,T,C or G
acggatgctacttgtccaatgatggtaaaagggtagcttactggttgtcctccgattcaggttagaatgaggaggtctgcggctaggagtcaataaagtgattggcttagtgggcgaaatattatgctttgttgtttggatatatggaggatggggattattgctaggatgaggatggatagtaatagggcaaggacgcctcctagcttgttagggacggatcggagaattgtgtaggcgaataggaaatatcattcgggcttgatgtggggaggggtgtttaaggggttggctagggtataattgtctgggtcgcctaggaggtctggtgagaatagtgttaatgtcattaaggagagaaggaagagaagtangccnngggcg

SEQ ID NO: 2930 - DNA, 506 bp, Homo sapiens
  misc_feature 488: n = A,T,C or G
acgatcttagcatcagcagggcagcagcgttctcggatgctagctactctttttaaggatgaaaggtgccagcaacttgctgcctatgggatcctagagaaaatgtatctagataggatcatcagaggaaatcaacttcaagaatttgccgccatgctgatgcctcaccaaaaagcaactacagctgatggttccagcatcttggacagagctgttattgaacacaatttgttgtctgcaagcaaattatataataatattaccttcgaagaacttggagctcttttagagatccctgcagctaaggcggaaaagatagcatctcaaatgataaccgaaggacgtatgaatggatttattgaccagattgatggaatagttcattttgaaacacgagaagccctgccaacgtgggataagcagatccaatcactttgtttccaagtgaataaccttttggagaaaattagtcaaacagcaccagaatngacagcacaagccatgga

SEQ ID NO: 2931 - DNA, 528 bp, Homo sapiens
aaacctttgacctgttttaaccaatgaagattatgaatatgttaatatgatgtaaattgctatttaagtgtaaagcagttctaagttttagtatttgggggattggtttttattatttttttcctttttgaaaaatactgagggatcttttgataaagttagtaatgcatgttagattttagttttgcaagcatgttgtttttcaaatatatcaagtatagaaaaaggtaaaacagttaagaaggaaggcaattatattattcttctgtagttaagcaaacacttgttgagtgcctgctatgtgcacggcatgggcccatatgtgtgaggagcttgtctaattatgtaggaagcaatagatctcggtagttacgtattgggcagatacttactgtatgaatgaaagaacatcacagtaatcacaatatcagagctgaattatcctcagtgtagcttcttggaattcagtttctggaactagagatagagcatttattaaaaaaaactcctgttgagactgtgtcttat

SEQ ID NO: 2932 - DNA, 607 bp, Homo sapiens
  misc_feature 12: n = A,T,C or G
aaattaaccctnactaaagggaataagcttgcggccgcaaaccttttttttttttttttttgctttcaagtttattaaagaagatcactaaagatattgactagagaatgctgtgtgctatttcaattacatttgtttttcttttattaacaggaattttgattcttcaaggaagtggctcaatttcaatttcaggtgaccaggtttatcgtgacttttccttcttgtttacttttcgctaggaaggggagttgtaggggcagattcaggtattggaataggaaaattacgtctaaaccatggaaatcttggaaatggaattggtggaagtgggcgaaatggatatgggtaagggaacacaaaaaaccctgaagctaattcatcgctgtcactgatacttcttttttctcgttcctggtcttgagagactgggaaaccaacagccactgccaagatggctgtgatcaggaggagaactttcttcatctcaaacgtttcagtcagttctttctctctgacgctgcctcgtgccgaattcttggcctcgagggccaaattccctatagtgagtcgtattaaattcgtaatcatgtcatagctgtttcct

SEQ ID NO: 2933 - DNA, 313 bp, Homo sapiens
  misc_feature 297: n = A,T,C or G
gtagttgctaacagcaaagagagttacgaattacgttacttccagattaaccaggacgaagaagaggaggaagacgaggattaaatttcatttatctggaaaattttgtatgagttcttgaataaaacttgggaaccaaaatggtggtttatccttgtatctctgcagtgtggattgaacagaaaattggaaatcatagtcaaagggcttcccttggttcgccactcatttatttgtaacttgacttctttttttttctgcttaaaaatttcaattctcgtggtaataccagagtanaaggagagggtgactt

SEQ ID NO: 2934 - DNA, 445 bp, Homo sapiens
  misc_feature 416: n = A,T,C or G
accgagaatgccgttcgggggcctttatggcgacgtaagaacgggcttggacttggtctgtgaatccagaatccagaggtgcaggtagcactatggatcagggttagcctcggggggccaaaaacacggcttcagtttctccccaactctcacttagtgttaagagtggcagaggtgggtgtgggagcttcccaaagacctgctccatcttccccagaggtggaagagttggactgtgtgtggggtaagggcagaagggccaactggggagtgggctagtggcttgggagtggacgtgtgttggcagatcccagaggctacttgtgactctgggaagaggagtctaagttccatcattacctataaaccgccaaggttctgctgcagggcggataggtgggaggtcagcaggggtnaagacggtccccccaatgacacaatggta

SEQ ID NO: 2935 - DNA, 223 bp, Homo sapiens
  misc_feature 205: n = A,T,C or G
accattgtatggggcaattttaagtcagctaaggcaataaccttatgcatgaacatttcccagactttcatgaagctgttgaggtcctaggcaattaatgcagcagttgcgataaataaaaacatctcacctaagtctccttttcttcataacatagatactgacatgatacgaagctctcagcttagggaaagagaataaattntagattatagaacatgga

SEQ ID NO: 2936 - DNA, 341 bp, Homo sapiens
  misc_feature 297: n = A,T,C or G
acacttctgtcttcaaactgtatcttctttggatggaattaagatgtaactgtatagttttaagataaataaatgggaagttggtccaactaagatgacagcagatatattacatgcaggatttaatattttctaattctctcttttaaaaaaaaggatgctgttggattgggaaaaaaaaagtcaaaaaagaacccagattcaatatataaaaatgtcccacaataggtcgacaatggcagtaaaaataagaggaaaaaagtaatctttctggaacatcatttttcaataacatanaaacactaagtgccaggaagattcctattcatgtaattttagca

SEQ ID NO: 2937 - DNA, 318 bp, Homo sapiens
acagcaaagcgacccttggtgtcatagatcagacggaaattctctcccgtcttgtcaatgctgatgacatccatgaatccagcagggtaggttatatcagttcggaccttgccatcgattttaatgaaccgctgcatgcaaatcttctttacttcatctcctgtcagggcatacttaagtctgttcctcaggaaaatgatgagggggagacactctctcaacttgtggggaccggtggatggacgaggagcaaacacaccggtcaatttatccagcatccaatgctttggagctgccacccgcttcagatgcttcttg

SEQ ID NO: 2938 - DNA, 527 bp, Homo sapiens
  misc_feature 408: n = A,T,C or G
actatgttaaacattctatatacatggtctcatatagtccttacgagtcaatgtggtaggtaatcctatattcctattttagagatgaacaaaaaaaaaggctttgagaatttatcaaggacccataataatccacagaacctaaattcaaatccttttgtccaactccgaagacttatctcttaaccacttcataagattaaaacgctgaaggggcacatactgttatgaattttaatggctcctacacatgcatcctttatatatacccttcatgatttttcaaaccatgtcagattctcatttttcaattctcaagatacagcatcttcttatagcatcttcaccacctttcccgtttactgtcttaaatgtgcccaatctcggaaatatcaataacaaaacaangcttgttgacattttgtgaaacatttaaggagacttccaaggaatgtaacatatgtagactttgtgacacatatattggcatgtggtcacagctctgttctgagatgagatgttactat

SEQ ID NO: 2939 - DNA, 417 bp, Homo sapiens
acattaaatgataatgtttgaaaatcacacaaagatttcacaaaactataactaatacagaaagatgtgtgaaaacattaggggctttcaaaattttaggtatggaattttgcaaagattattttggcttataagtgttaggcaatcactaacctgaaataagtgacaaaaacatgcagatgattaccatttcaacaaatgaaaagctataaatgtctagctaaaagctaaaatattgtgtagctgaaatactaccatataacaatgggaatttataaaacaggaaaaaaggttattctttaaaagtcttccatgagtaatagactttcagtaattttctataaaaacattcagaaattaagtttctcaaattatgtttatcaccaaaattatgttttcagtagtgactggagctat

SEQ ID NO: 2940 - DNA, 353 bp, Homo sapiens
  misc_feature 3, 4: n = A,T,C or G
acnntgtctagtgatgagtttgctaatacaatgccagtcaggccacctacggtgaaaagaaagatgaatcctagggctcagagcactgcagcagatcatttcatattgcttccgtggagtgtggcgagtcagctaaatactttgacgccggtggggatagcgatgattatggtagcggaggtgaaatatgctcgtgtgtctacgtctattcctactgtaaatatatggtgtgctcacacgataaaccctaggaagccaattgatatcatagctcagaccatacctatgtatccaaatggttctttttttccggagtagtaagttacaatatgggagattattccgaagcctgg

SEQ ID NO: 2941 - DNA, 323 bp, Homo sapiens
  misc_feature 240, 280: n = A,T,C or G
accgtgagaagatagaggcagaactgcaggacatctgcaatgatgttctggagctgttggacaaatatcttattcccaatgctacacaaccagaaagtaaggtgttctacttgaaaatgaaaggagattattttaggtatctttctgaagtggcatctggagacaacaaacaaaccactgtgtcgaactcccagcaggcttaccaggaagcatttgaaattagtaagaaagaaatgcagnctacacacccaattcgtcttggtctggcactaaatttctnagtcttttactatgagattctaaactctcctgaaaaggcctgt

SEQ ID NO: 2942 - DNA, 503 bp, Homo sapiens
acttcagttggtgcacaaaatactgtcatttgctcaaagctggctgccaaatgtttggtgatgaaggcagaaatgaatggctcaaaacttgggagaagagcaaaacctgaaggggccctccagaacaatgatgggctttatgatcctgactgcgatgagagcgggctctttaaggccaagcagtgcaacggcacctccatgtgctggtgtgtgaacactgctggggtcagaagaacagacaaggacactgaaataacctgctctgagcgagtgagaacctactggatcatcattgaactaaaacacaaagcaagagaaaaaccttatgatagtaaaagtttgcggactgcacttcagaaggagatcacaacgcgttatcaactggatccaaaatttatcacgagtattttgtatgagaataatgttatcactattgatctggttcaaaattcttctcaaaaaactcagaatgatgtggacatagctgatgtggcttattattt

SEQ ID NO: 2943 - DNA, 376 bp, Homo sapiens
accaactaaatgctctatgaactctatccttagtaaatctattaaacctgaataatttaaaagatcatgttcattttgtaatagcaaaatttgattttaattttttatttagaattggtgtatttatcatagggacttccaatttttcttcactttttgaatggatattggctatagttttatgttttaacgggaatgaatttcaagtcataataatcagaatttttagttttacttttttcttttacaatatggattttgttgttatttggatagtggttcaataaatcttaagctcagataattaaacactattttgaatcttaacaagatactgaggctttttttgtatgggatgatatcaacctatgtacct

SEQ ID NO: 2944 - DNA, 463 bp, Homo sapiens
  misc_feature 456: n = A,T,C or G
aaaatttggttttgaatgaacctgcaaagcatcctgcagcgtgagcagctcctccacctggagctccgaagcatcttctcaggccaaagcggcattacccgtgaatctgtcttctccgccacagcatggtttgaggcgcagtctgttaatatagctgggccatgtcagtgactgttgtgtttgtggggtcaggtggggggcatggtatttgcaaaaaaaacaaattatggctaatttattattttgttgcagtggggttaactgtaaactcatgtaagagtctgtgatttcctcactggttgatctctctctctgtaatcctcattgcaaattttcaccaggacagcgttttttgattagaggggagctctggcacagtatgctttaatttagcaggaacttccagatgatttaaattctcgatgctgtgatgacacacatatgatctttcgtgtntctgagc

SEQ ID NO: 2945 - DNA, 193 bp, Homo sapiens
  misc_feature 14, 15: n = A,T,C or G
actgtttgcatgtnnacattaagtgcatgtattattaattcaggttaattaatttaaaaatttaagtttaagggcaaaaagaaccactactttagagagaatggagatactagcaagtaaaatatatgaaagagctagttggaaaggaagccaagcatggagtagaacgtggggccgtcagctgctaaagggt

SEQ ID NO: 2946 - DNA, 300 bp, Homo sapiens
  misc_feature 262, 286: n = A,T,C or G
acagcattctggaataaagcaaaagagtgttcattcacacacacagtagcttcaaaactgttcgatctgtttgttcccatgtagttttctaaagatggaaaaaaaggactttggtcatcaagactactgtggccatattagattactggaacatctaagcatcagtgtgtgaccatgcgaacaaaagacttcggggagtgtctatttttaaaaaggtttatgtgtgtcgaggcagttgtaaaagatttactgcagaatcaancccacttttaggcttaggaccagnttctaactatctaa

SEQ ID NO: 2947 - DNA, 381 bp, Homo sapiens
acaattccttgcttctttatgcaacctaacaaaataatatagaatgaagtcattagaaaaatatgaacctttctgaatctatattacatttttaatttaaattggaaaatacagtttagatcatatgaaacatatggatttcagacatgtattatctgtttctaacagattattacaggcggtctttattttggctgaaatgcaaaaatatgactttcttaataacagattagttaaaaatactttccattgatagcagtgctagtccctagaacaaaaggtaagcaaaacttatttgtaagttactgcctattcaatgcccagaatatgtagatcctaaatctaagcccttaatatacatctactttaaagataactgaa

SEQ ID NO: 2948 - DNA, 259 bp, Homo sapiens
gcgatgagagcgggctctttaaggccaagcagtgcaacgacacctccacgtgctggtgtgtgaacactgctggggtcagaagaacagacaaggacactgaaataacctgctctgagcgagtgagaacctactggatcatcattgaactaaaacacaaagcaagagaaaaaccttatgatagtaaaagtttgcggactgcacttcagaaggagatcacaacgcgttatcaactggatccaaaatttatcacgagtatttt

SEQ ID NO: 2949 - DNA, 472 bp, Homo sapiens
acttgtcctagcgttttggaagaggaaaacaggaacccaccaaaccaaccaatcaaccaaacaaagaaaaaattccacaatgaaagaatgtattttgtctttttgcattttggtgtataagccatcaatattcagcaaaatgattcctttctttaaaaaaaaaaaatgtggaggaaagtagaaatttaccaaggttgttggcccagggcgttaaattcacagatttttttaacgagaaaaacacacagaagaagctacctcaggtgtttttacctcagcaccttgctcttgtgtttcccttagagattttgtaaagctgatagttggagcatttttttatttttttaataaaaatgagttggaaaaaaaataagatatcaactgccagcctggagaaggtgacagtccaagtgtgcaacagctgttctgaattgtcttccgctagccaagaacctatatggccttcttttgg

SEQ ID NO: 2950 - DNA, 277 bp, Homo sapiens
  misc_feature 211, 266, 267, 269, 277: n = A,T,C or G
acacagaattttctcagccaagttctaggagttcaaaactatgcatcaattccacagcctatgacagaccttccagaacttgatacaccagaatctgccagaataatagctttcatctcttggcttagagagcagagaccatttttcccaatactttatgtaataagggatgagagtccaatgaaagcaaacttccttcaaaacatgatanaagacagaacagaatctgcattatcatattatgaattcctgttgcatatacagcnncnagtgaatn

SEQ ID NO: 2951 - DNA, 132 bp, Homo sapiens
acagttatttatgcctctgtatttaaaaaactaacacccagtctgttccccatggccacttgggtcttccctgtatgattccttgatggagatatttacatgaattgcattttactttaatcacaaaaaaaa

SEQ ID NO: 2952 - DNA, 492 bp, Homo sapiens
acctgtgggtttattacctatgggtttatatcctcaaatacgacattctagtcaaagtcttggtaatataaccaatgttttcaaatgtattctgtcatacaaagagcagatttttattgaacttgtgcaataactatattaccatacaatataaatattcatgaatagtttcccaagtctggagcgaccacatagggagaaaatgtaaatgtctcaatttttgttcacaaaagtatattttatcaaattgctgtaagctgtggatagcttaaaagaaaaaaagtttcctgaaatctgggaaacaagacatttaaagaatcagcaaaatttcaaataaaaaattatgaaaatattatcctcattagttcatttagtcccatgaaattaattattttctctgcttgatcttggtggacagtttcatgaagctgtcagttagttcattaaagttttggaaattctcagacagtgcagtggtatcagaaacttgta

SEQ ID NO: 2953 - DNA, 411 bp, Homo sapiens
  misc_feature 59, 388, 390, 401: n = A,T,C or G
actatgggaagctgctaaaataatatttgatagtaaaagtatgtaatgtgctatctcanctagtagtaaactaaaaataaactgaaactttatggaatctgaagttattttccttgattaaatagaattaataaaccaatatgaggaaacatgaaaccatgcaatctactatcaactttgaaaaagtgattgaacgaaccacttagctttcagatgatgaacactgataagtcatttgtcattactataaattttaaaatctgttaataagatggcctatagggaggaaaaaggggcctctgggaaattatgctgaagatcaccgaaaggaaaatgtaactgtaattttataatacaataccatttgaactgaaatacaacatgcttngnaattctattgnccctggattg

SEQ ID NO: 2954 - DNA, 432 bp, Homo sapiens
gcagcagatcagcatccttcgctgccccttagcaacttaggtggttgatttgaaactgtgaaggtgtgattttttcaggagctggaagtcttagaaaagccttgtaaatgcctatattgtgggcttttaacgtatttaagggaccacttaagacgagattagatgggctcttctggatttgttcctcatttgtcacaggtgtcttgtgattgaaaatcatgagcgaagtgaaattgcattgaatttcaagggaatttagtatgtaaatcgtgccttagaaacacatctgttgtcttttctgtgtttggtcgatattaataatggcaaaatttttgcctatctagtatcttcaaattgtagtctttgtaacaaccaaataaccttttgtggtcactgtaaaattaatatttggtagacagaatccatgtacct

SEQ ID NO: 2955 - DNA, 431 bp, Homo sapiens
acttttgcaatgaatgttaacaacaacaaaaaaaatctctaaacacctgaaagccccactattaacatggactatggtaataaaaaattttgacatttaatttgttcaacatatagtatttacattatgaaaccaatggtgatgatacaataaagtgataaagaaatagtaaaaataaactttaaaaagcaaaggtttatagtctgacaatgctaattatcctaattgtatataaaaaattaaaacatagagctttctgttacaaaattcttaatcctctgggttgtaatcattacttgctaccaatttacatgcaacatctgctaggactgacatttgatttttttccccaagaatgtgtgagtagataaatgacatttcagagcagatattaatttacttgtggacagaaaaagaaactcaagattggt

SEQ ID NO: 2956 - DNA, 442 bp, Homo sapiens
acttatttcaacaattcttagagatgctagctagtgttgaagctaaaaatagctttatttatgctgaattgtgatttttttatgccaaattttttttagttctaatcattgatgatagcttggaaataaataattatgccatggcatttgacagttcattattcctataggaattaaattgagtttagagagaatggtggtgttgagctgattattaacagttactgaaatcaaatatttatttgttacattattccatttgtattttaggtttccttttacattctttttatatgcattctgacattacatattttttaagactatggaaataatttaaagatttaagctctggtggatgattatctgctaagtaagtctgaaaatgtaatattttgataatactgtaatatacctgtcacacaaatgcttttctaatgtt

SEQ ID NO: 2957 - DNA, 88 bp, Homo sapiens
  misc_feature 47, 53, 55, 88: n = A,T,C or G
acaagcttttttttttttttttttttttttttttttttttttttttnaaactngnaaacaattttaatgtttactcaaaataaatgan

SEQ ID NO: 2958 - DNA, 92 bp, Homo sapiens
  misc_feature 85: n = A,T,C or G
actcatgcccgactgtctaccaggcacacagactttgaggagagggagtatgtcgtcttgatccgcatcaatgatgggggccggncaccctt

SEQ ID NO: 2959 - DNA, 458 bp, Homo sapiens
accctgcaaagccacaggggcagagctgctcaagaccatgggaacctacctcttgtatcagcatgacctggatgtgagacatggagtcaaaggagaacattttggagctctaagatttgactgccctgctggattttggacttgcatggggcctgtagcccctttgttttggccagtttctcccatttggaatggctatatttacccaatgcctatacccccattgtatccaggaagtaactaacctgcttttgattttacaggctcataggtggaagggacttgccttgtctcagatgagactttagactgtggacttttgagttaatgctgaaatgagttaagactttgggggactgttagaaaggcatgattggttttgaaatgcgagatcatgagatttgggaggggccaggggcagaatgatatggtttggctgtgtccccatccgaatctca

SEQ ID NO: 2960 - DNA, 570 bp, Homo sapiens
  misc_feature 449, 482, 561: n = A,T,C or G
acctcttcttaaagtgcactttgcagacgtttcactccttttccaataagtttgagttaggagcttttaccttgtagcagagcagtattaacatctagttggttcacctggaaaacagagaggctgaccgtggggctcaccatgcggatgcgggtcacactgaatgctggagagatgttatgtaatatgctgaggtggcgacctcagtggagaaatgtaaagactgaattgaattttaagctaatgtgaaatcagagaatgttgtaataagtaaatgccttaagagtatttaaaatatgcttccacatttcaaaatataaaatgtaacatgataagagattttgcgtttgacattgtgtctgggaaggaagggccagaccttggacctttggaacctgctgtcaacaggtcttacagggctgcttgaaccctcataggcctaggctttngtctaaaaggaacatttaaaaagttgccctgtnaagttatttggtgtcattgaccaattgcatcccagctaaaaagcaagaggcatcgttgcctggataatagaggatgtgnttcagccct

SEQ ID NO: 2961 - DNA, 450 bp, Homo sapiens
acaaagactttctcctccgaacaatttgagagtaaattgctgacattatgtcatcacccctgattactttagtgggcattcctacaagtcaggacattctacataactacagtgcaaaccttgcaatcagaaagtcaacattaatacattctagtttgttacttctctgtaatgtcctttatagcaaaaggatcccattctaatccatggcttgtatttagttgttgtatctgttagatctttcagtctggaacagttcctcagtctttccttgaccttcatgaccttgaatattttgaagagtaaagtctggtaatataagaatgtccctcaattgggtttcatggtgattagatttagattatatgattttttggcaggagtatcacagaagtgacccagtgatcttctcattgcatcttacctgtgaccctacagttttgatttgcc

SEQ ID NO: 2962 - DNA, 331 bp, Homo sapiens
accctaaatcagcatattactcataaatcattaattaatataagcataggaaatggtcttaaaagatactgcattcattcatcagatatttattccatgcctactctatgctaggcactgtgctagatggtatgaaaacttattaggaacctttttgtttttgagaccattgcattctggctggtttgtgctggtttaacgacatctaagaaggtttagaaatggtgagaccaaaacaataactgttaatgatggacagcattattaggaaccctgtagtatgatatttaacaatataggcttcaagaagggctggtcctaagagggggca

SEQ ID NO: 2963 - DNA, 465 bp, Homo sapiens
  misc_feature 457: n = A,T,C or G
accaattctcccttagtttctttttttatagttggtttattttgcaattataaatgttaaacatccctagagatgaaagttaaaatggttgatcacagatcagtagcaaaatacaaattgacaattcaaaattataaataaaactctgttgaggatgtttaactttgagtctccaaatttaagagctaagcttggaagaaacaaatttataggttatatttccctcttaaattaaaaaacaaacttcctctggcagtagtttgtgaattcctttcattgtaatgataccatgattacaggatcaaaaatgcttaacttacttgccattctgctcacatcatcacagttgtttttttttttttaagcactcaatgtaggcattttaatcttctggataacagagtatcttttgagaaattaaaatcgaattgaccatttgcaatatttggttttcctnataggtac

SEQ ID NO: 2964 - DNA, 567 bp, Homo sapiens
  misc_feature 527: n = A,T,C or G
acagaacatcgtcagcactagcacagtttacagaacctcacagacccaaaggaacatcaataggcaaagcgactacaggaggcgtgtgtccgcgtgggcgaggtaaagagggtcagtattggtcaagtgacagtgtcggtaatctggcaagacagtgatgttaagaaggttcatagtttaagaattatctaaaatattttaaaaactataaagctgcaacacatgatttttacacctagttactagaaaactaaggaaagcacttattagctctgaataaagtaacatggaaagcacttttactaatcgacaaaaaaaccttctaatgcattatcagaaagattttataatacaaggaggcatattgctcagtcagaaggggttctataagaaaagcacttactaagttagcgactaacagaacaaccagtttaaagatgaattaaatgcccaatttggggaggcatggcaggtgtaagagaaaggaaaagcttaagaaaacatttcctgataataccaacctttcnttcatcatctactgcatttgacagaaattaaccttttaga

SEQ ID NO: 2965 - DNA, 467 bp, Homo sapiens
acagctggtgcttctgccttaccccatcctctcctctcagattcaccgaggactgttcagatggtaacattctcttagggtagggaactctgcagagggagagctgaggaggttccggccatagttgtttgtaatcttagggctctgggcttggctgaaacatgacggtattgcttggtttcaggcttgacactgccaggcgcctattgcttgacctctgtttaaatgagggacttcaagactagacagcatggctcttttcagtttattgcatgaaggagttacactagtccaagttaaaagcggaccccaaatggttacattatacaagctgtgaggtttttaaacctgtgacaagggagagaagggaaattctactcattgcaaggaaatcctcacttaagcttcagtgagccacaagcacttaaaacccatgaaccttcagctgatcgtccttagccagtcca

SEQ ID NO: 2966 - DNA, 473 bp, Homo sapiens
acaaagcagcaactgcaatactcaaggttaaaacattagaaaagcatttgtgtgacaggtatattacagtattatcaaaatattacattttcagacttacttagcagataatcatccaccagagcttaaatctttaaattatttccatagtcttaaaaaatatgtaatgttagaatgcatataaaaagaatgtaaaaggaaacctaaaatacaaatggaataatgtaacaaataaatatttgatttcagtaactgttaataatcagctcaacaccaccattctctctaaactcaatttaattcttataggaataatgaactgtcaaatgccatggcataattatttatttccaagctatcatcaatgattagaactaaaaaaaatttggcataaaaaaatcacaattcagcataaataaagctatttttagcttcaacactagctagcatctctaagaattgttgaaataagt

SEQ ID NO: 2967 - DNA, 494 bp, Homo sapiens
acctgtgggtttattacctatgggtttatatcctcaaatacgacattctagtcaaagtcttggtaatataaccaatgttttcaaatgtattctgtcatacaaagagcagatttttattgaacttgtgcaataactatattaccatacaatataaatattcatgaatagtttcccaagtctggagcgaccacatagggagaaaatgtaaatgtctcaatttttgttcacaaaagtatattttatcaaattgctgtaagctgtggatagcttaaaagaaaaaaggtttcctgaaatctgggaaacaagacatttaaagaatcagcaaaatttcaaataaaaaattatgaaaatattatcctcattagttcatttagtcccatgaaattaattattttctctgcttgatcttggtggacagtttcatgaagctgtcagttagttcattaaagttttggaaattctcagacagtgcagtggtatcagaaacttgtatt

SEQ ID NO: 2968 - DNA, 350 bp, Homo sapiens
  misc_feature 318, 346: n = A,T,C or G
acaaaaaagaactacttgtattctagaagaaatatgaaatgcttaatttataagcgggctggagattttttccaatattgttttctttgaaaatgaaaggggatcatctattttagttttggggtctgggaactttttgaaaatttaatttgtggaccaatgttttgtgaaagctaaagagggcaggggttaaaatagggcttgaatttctcattctgtatagaccagcaaacttccctgtgcaaggcaagtttacatcacaaatccaagaatgtttgcatcctaaatgctagtttgcttcagcccctagttaacctnaaggacttggtttgcatataaaaggtanacag

SEQ ID NO: 2969 - DNA, 376 bp, Homo sapiens
  misc_feature 269: n = A,T,C or G
acggccagggctattggttgaatgagtaggctgatggtttcgataataactagtatggggataaggggtgtaggtgtgccttgtggtaagaagtgggctagggcatttttaatcttagagcgaaagcctataatcactgcgcccgctcataaggggatggtcatggctaggtttatagatagttgggtggttggtgtaaatgagtgaggcaggagtccgaggaggttagttgtggcaataaaaatgattaaggatactagtataagagntcaggttcgtcctttagtgttgtgtatggttatcatttgttttgaggttagtttgattagtcattgttgggtggtgattagtcggttgttgatgagatattggaggt

SEQ ID NO: 2970 - DNA, 500 bp, Homo sapiens
actttcctagatgacatatcgagtcaacatgaagccttagctaaaatgaatgattcaggatattaatgagaaattctcacaaatgatatgcatttaggaaatgattttgctttccttaaatagttcgaaggcttgaaaataaacttttttttgcatttcttttagaatgtttggtcattaacaacttttaaccttatcttcctcttctccttagcccttaacagaccgagtccattctatttggaaataacaagaacttgatcagattattaaatcttggaaacctcatttttaccttataaagtgttaagtttcacgtgcatattctcttacaaatgtagtataaatgttatggatagatataaggaaatattggcatagtataggtaattagtgaaaagacacaacttcacaaaacataataaaagataaacatgaaactataacactacttaaaaaatattttctcccaaattattttagcatttttgactagttta

SEQ ID NO: 2971 - DNA, 246 bp, Homo sapiens
acggccatcttccagctgcttgcctgcaaagatgagcctctgctggtcggggggaatgccttccttatcctggatcttggccttcacattttcgatggtgtcactgggctccacctcaagggtgatggtcttgccggtaagggttttcacgaagatctgcattttgacctgttagcggataccaggatcctgccaatcaccaaccacgtccacccacagggacacaaacaagctcacccaacaaag

SEQ ID NO: 2972 - DNA, 282 bp, Homo sapiens
gctgaagatgataatgctatccgagaacatttgtgcatcagagcttatttggaagcccatgaaacctttaatgagtggtttaagcatatgaattcagttccacaaaaacctgctttgatacctcaaccaacttttactgagaaagtggctcatgaacacaaagaaaagaaatatgaaatggattttggtatttggaaagggcatttggatgccctaactgctgatgtgaaggagaaaatgtataacgtcttgttgtttgttgatggagggtggatggtggat

SEQ ID NO: 2973 - DNA, 484 bp, Homo sapiens
ttttttttgtagaacattaacccagattgctaatagcttcacgttacggcattcttccacacagtccagattgatttaaggaaaagcagaaatggaagtcaaagtgtgttataaattgagactgaaaaacatgctttaaaaaatagatttaatttcttacactgtgaatagccattgtattgttttgtttctgataaatcagttgttttgggcccctatttttgaactgttaaaaaattttgatgcttttcgtggataaaagtagtgcctctctttatacaactgatggggttttaaaaagtgtaaattgccttttttgttaaacttattttaaatgctttagtatttaaagggtgtatgttattaattaatctgcatatttgtaacgcaaataactacttcctgatttacatctcaatatattcttctttcatttgcccaatttaaaaaatacgtagtctctattgttgctgtttactaatag

SEQ ID NO: 2974 - DNA, 229 bp, Homo sapiens
actctagtgtcctatacctcttggaaacgaaagagggcccaacctacaactaagaagggacaaaccttgaactaagtaagaccttacacacccagaaagaacactgggccctccttcttcagggacaatgcagtagccacttggcttgtggaatttactgaaggctatttcctgtaacttgctagttaacttagttttgtatttcaggcagaggtgcgctctgtaatgt

SEQ ID NO: 2975 - DNA, 488 bp, Homo sapiens
  misc_feature 476: n = A,T,C or G
acttttccagcttgggttccctgggaagcaacctctgagaagaaaattagcattcaggccatctattagtgaacgctcttgggattgatacctatgacatagaagggaagagattggcatggggcagagggagaagttgagcagtgccattgaaggcctcactgacttcttggagatccctagagtaagaatggtttttgaaattttcctatgtttgagcaaagagccttcatctttacaaccctgtgagatcatgcattggatgtggagggcccttggaaggaggtgtcaccttcagcaaggcagagagctgacagctgagggttatttatcttccaacagtgatctgagcaggtggatgaaaaaataattccctccaaaggggcatctccctagaccaccatccacagtgctctaagcagaaaagggtggtgggttgagttctttgcttttctagtctataatgttctgattgntggggagaaagt

SEQ ID NO: 2976 - DNA, 495 bp, Homo sapiens
  misc_feature 469: n = A,T,C or G
acatgatacagattggttttgcagtttttaatgaactgaaatagaaatgtctaaatacagcagtatctgcctgtgcaacaaatatctgtaaggtaaaataaggtatttgatagaagaacatctgcaagaacaaatcagatgaaaaatctgaaaaggtttctatataccttctggattttaaaaaaacccaaaaattaatggctcaagatactacattgctaaagttaggggaaaaaagtaaaaaggctgtgagttctgttgcaagagctcatttgtagacttgcaaaatctaactaattttatattatgcttgttgttagagcagtgctcaaaattacagaagcttcaaattgttgtgttttcacaaaatttgctacatatgttgacatgaatgtgtgtcagggaattcatacccaggtaaatgacaattacatcagtatagctaatttttgccaccttgggaggaatnggaattctgcctattttcgaattaat

SEQ ID NO: 2977 - DNA, 88 bp, Homo sapiens
acaaaactttttatatcaaaaggctttgcacatttctatatgagtgggtttactggtaaattatgttattttttacaactaattttgt

SEQ ID NO: 2978 - DNA, 217 bp, Homo sapiens; identical to SEQ ID NO: 2780

SEQ ID NO: 2979 - DNA, 456 bp, Homo sapiens
acaaagcagcaactgcaatactcaaggttaaaacattagaaaagcatttgtgtgacaggtatattacagtattatcaaaatattacattttcagacttacttagcagataatcatccaccagagcttaaatctttaaattatttccatagtcttaaaaaatatgtaatgtcagaatgcatataaaaagaatgtaaaaggaaacctaaaatacaaatggaataatgtaacaaataaatatttgatttcagtaactgttaataatcagctcaacaccaccattctctctaaactcaatttaattcttataggaataatgaactgtcaaatgccatggcataattatttatttccaagctatcatcaatgattagaactaaaaaaaaatttggcataaaaaaatcacaattcagcataaataaagctatttttagcttcaacactagctagcatctcta

SEQ ID NO: 2980 - DNA, 280 bp, Homo sapiens
acttgttcttgcggatcatgtgtctgatgctgctgagcgtggcgcgagcattcttgttgatggtggtccgcacataggaggtggcaggcttccgctggccggatctccgcttaatgaccaccacgacacctttgccgtcggctgccggctccacgcccacagtcttgcggtgaatcagtccgttgtagcggaaggaattgcgggccttcaagttattgggctcagtgctgtaggtctgcttattcctcttgatcaggaaactggagcagttccgcacgac

SEQ ID NO: 2981 - DNA, 302 bp, Homo sapiens
ctcagcctcctcggaagaaaagggcccgggtagatcctactgttgaaaatgaggaaacattcatgaacagagttgaagttaaagtaaagattcctgaagagctaaaaccgtggcttgttgatgactgggacttaattaccaggcaaaaacagctcttttatcttcctgccaagaagaatgtggattccattcttgaggattatgcaaattacaagaaatctcgtggaaacacagataataaggagtatgcggttaatgaagttgtggcagggataaaagaatacttcaacgtaatgttgggt

SEQ ID NO: 2982 - DNA, 502 bp, Homo sapiens
  misc_feature 486, 491: n = A,T,C or G
actctcccacaccagcctagagacttctgcttattttctgccgcatcctcagttcccagctctgtaggtgttcacaagcatgaattcaacactgtgcgaaagaactgaagctcacgtagtccacaacttcccccagtgtggggtgtgtgccaccagtgctacacaaagtgttaggtggtgtgcaaacattttgtattttaatagttatacacttgttttaatgtgaattagaaaaaatataagaaagacaacaaaggtgttatagatactaataattaggacaagttgaaaggtttaaaaaaatacgttactaagtaaatgatggtatagagatcatttaagcatggcaaatgtaataaaaatgacacacacacaacagtttaagtaaaactgactcagtggcaaagaaaaaagatagaagcctatagacagttcctcacacagcagcgaaatgagacactgcaactaggggtcctgctttcgttncttgntatgtacctcg

SEQ ID NO: 2983 - DNA, 297 bp, Homo sapiens
actctggaccaaaaataaaacttctttgaaggagacggaatcctttttagcaataaggacactccatatgccgttgggcaagaggaattagcctacagaaaggatctggcggtgccaaggcttggttaggcctttgagaagctaagcttggttaaaaggagttttaggatggaattgaaaactgagtctagttctgtttgaagggggcagctttttactcagctttgtgcactttggggtgctcgctcggggtgtccgcatttctcagaccttggtttggttccctgcacagtaagt

SEQ ID NO: 2984 - DNA, 350 bp, Homo sapiens
actgggtggagcacatgactggatcccagttaatccctcccagcttaccagtaaaacctcaggattcatgctttcctgggagccacctgcggccactaagataggagcggggttcagacatggccaggcgctcctaatctcagacccaaagtgcaatttttggcagcctgcatgagaaggagggtgggaggaaaggtggctagaaccaagggtagcagcctgggggcttgagaggaaaccaggcacagcccatcctaccctgtctcacgagcagcccgtcctcctcctgactccccttaccccacacaccgagcgccattctcttgctgcctcatctattctggttaggt

SEQ ID NO: 2985 - DNA, 523 bp, Homo sapiens
acatgttccaccttgctcacttgattagcataccctatatctgcactgcttcagaatatagaaattaaacaaaaaaacataagcacagtggactatctcctcccatttcataaagtaaatgaaaatgtttgtgtataaagctaatttaagaaaaacattttaaactttaaggcttacatactttagtagctaggactaaaattaagaaatacaaagctaaataaatcctccagtgatacttctattattgattgataccacattttcaagtttagaatatattaactgcaaaagctgtaagaaaagaagtgatgcaaatttgtatagaacatttaaaaaacaatattcatgatatgagggataaattaacaaatgaagtaactgatttcagaattaactaaaacatatgctataatttagaaatttaacattattaaagaaaacctaatagaaaaaaaattaattaataaagccaacccaccagtgtcaacctgtttttgcctgtgacaaaaacaaagatcat

SEQ ID NO: 2986 - DNA, 509 bp, Homo sapiens
actttcctagatgacatatcgagtcaacatgaagccttagctgaaatgaatgattcaggatattaatgagaaattctcacaaatgatatgcatttaggaaatgattttgctttccttaaatagttcgaaggcttgaaaataaactttttttttgcatttcttttagaatgtttggtcattaacaacttttaaccttatcttcctcttctccttagcccttaacagaccaagtccattctatttggaaataacaagaacttgatcagattattaaatcttggaaacctcatttttaccttataaagtgttaagtttcacgtgcatattctcttacaaatgtagtataaatgttatggatagatataaggaaatattggcatagtataggtaattagtgaaaagacacaacttcacaaaacataataaaagataaacatgaaactataacactacttaaaaaatattttctcccaaattattttagcatttttgactagtttaataatatg

SEQ ID NO: 2987 - DNA, 408 bp, Homo sapiens
acaatccccaagccacggcaaaacatcaggagaacgcaccgatctcacattgtacacagcgcagaacaggatcaccccgaatgtcaacagaagaccaaaaatcactttacaaaaaaaaataaaaataacacccatttttatatttaaaaaagtgccagcccttgagctgcagacattagagacgcccaaggacgtgccgccactggaacgaggccgccagccacgtgtggcccgtcctggcctttaaagctgaactgaagcgctccagacactcatctctggagttcctctgtcttaggattttccctctctactgttgtaatgtgtgagcatgtcagcctcaccacgagtgaccttcatgcgtcctacgtgtgacggccagaggctttccctttgtaaggcttaaat

SEQ ID NO: 2988 - DNA, 350 bp, Homo sapiens
  misc_feature 302: n = A,T,C or G
acttctacacatctgcctaacttgggaatgaatgtgggagaaaatcgctgctgctgagatggactccagaagaagaaactgtttctccaggcgactttgaacccattttttggcagtgttcatattattaaactagtcaaaaatgctaaaataatttgggagaaaatattttttaagtagtgttatagtttcatgtttatcttttattatgttttgtgaagttgtgtcttttcactaattacctatactatgccaatatttccttatatctatccataacatttatactacatttgtaaganaatatgcacgtgaaacttaacactttataaggtaaaaatgaggtttcc

SEQ ID NO: 2989 - DNA, 327 bp, Homo sapiens
accttgtaggacagcagccctgtcctagaaggtatgtttagcgtatgtttagcagcattcctggcctctagctacccgatgccagagcatgctccccccgcagtcatgacaatcaaaaaatgtctccagacattgtcaaatgcctcctggggggcagtatttctcaagcacttttaagcaaaggtaagtattcatacaagaaatttagggggaaaaaacattgtttaaataaaagctatgtgttcctattcaacaatatttttgctttaaaagtaagtagagggcataaaagatgtcatattcaaatttccatttcataaatggtgt

SEQ ID NO: 2990 - DNA, 314 bp, Homo sapiens
acatgatacagattggttttgcagtttttaatgaactgaaatagaaatgtctaaatacagcagtatctgcctgtgcaacaaatatctgtaaggtaaaataaggtatttgatagaagaacatctgcaagaacaaatcagatgaaaaatctgaaaaggtttctatataccttctggattttaaaaaaacccaaaaattaatggctcaagatactacattgctaaagttaggggaaaaaagtaaaaaggctgtgagttctgttgcaagagctcatttgtagacttgcaaaatctaactaattttatattatgcttgt

SEQ ID NO: 2991 - DNA, 386 bp, Homo sapiens
  misc_feature 94, 165, 183, 297, 312, 335, 357, 379: n = A,T,C or G
cttttttttttttttttttttttttacagcaaaataattttatttcctaacatatggtaacatatacatccaatatgtgctccccttgcacatntattcacaagtgacttccaaatgacaactgctttgatatttaagcatgtgctaaaagttatcttagttganatatgaaaaatgctttanatggataacattctgagtatattggattagtcacagcaaaatttactttagttagatgagttctacaaatttaaagctttgaaaagctactacttttacttctaatacatccanatgaacacgatgtancaatatcagcttgtattccaaanaaatctcattagtttttctggngatggaaccacttatccacgtntgttggt

SEQ ID NO: 2992 - DNA, 368 bp, Homo sapiens
ggacacaaaggactctcgacccaaactgccccagaccctctccagaggttggggtgaccaactcatctggactcagacatatgaagaagctctatataaatccaagacaagcaacaaacccttgatgattattcatcacttggatgagtgcccacacagtcaagctttaaagaaagtgtttgctgaaaataaagaaatccagaaattggcagagcagtttgtcctcctcaatctggtttatgaaacaactgacaaacacctttctcctgatggccagtatgtccccaggattatgtttgttgacccatctctgacagttagagccgatatcactggaagatattcaaaccgtctctatgcttacgaac

SEQ ID NO: 2993 - DNA, 90 bp, Homo sapiens
  misc_feature 56, 86: n = A,T,C or G
acaagcttttttttttttttttttttttttttctttttaagaggaaaacccggtantgatgtcggggttgagggataggaggaaantggg

SEQ ID NO: 2994 - DNA, 423 bp, Homo sapiens
  misc_feature 282, 326, 412: n = A,T,C or G
acccgatggcatgatggactgagagtctaaagagtgacattctgtaaaatggaagcagtgaatccaaaacagacagaaaaatgttctgaaaacgaaaaaggagagaaaagtaaaaccatatgacacatagacgacccagaaaacacaccaaaaaacttatgaaacacctcgatggacaaaggaaaagtttctgtcacatgacaacttaaaacgttttccacagataacgaatgggtaaaacaacaaaattaaagaatgacaaaaaaaaaaaaaaaaaaaaancaacccagacacacaagtatgcctccacttctccagagttgcanaaaactgcacggaggaagcccagtcactgtagagagagagaaagaaataggagccccgtctcagggtccagggtggccctctgcanaagctgcaggt

SEQ ID NO: 2995 - DNA, 550 bp, Homo sapiens
  misc_feature 411: n = A,T,C or G
accctggacatctctgctgctcccactggagagtgagtctggagtccctggcactggggctttggtgagggctccatatacacccatggcctgagccaccatgctggtgacatcgccagggttggagggcagtaggatagtgttggagtccttggccagtttggagaacgcgctgacatactgctcggccacagtcagtgaagctgctgcatctccattatgttgtgtcagagctgcagccaggattcgaatagcttcagctttagccttggccttcgccagaactgcactggcctctcctgctgcctgatttatctgttcagccttttctgcttcggaggccaggatctgggcctgtttcttcccttctgccacattgatggccgactctcgggtcccctcagactctanaactgtggcccgtttccgccgctctgcctccacctgcatctgcatagactctttcacccggggtggcacatggatatccttgatctcataacggaggcagcggataccccagcagtcagcagcttggctgatggcatcc

SEQ ID NO: 2996 - DNA, 429 bp, Homo sapiens
acaaagaaagttttaagtcaaggcctcaccaattcctacagtattagtattgtgtctcaattctcaaaactaacttttaaaaagcttaaacttaacctaaaggattttaaatgaaaatataaactagaatgaacaaacatgagaaatatttctttgaatcagggagctagcacctttgagttttccaaaaaagcacgtctccccagtgtgttcactgtgatgtggtgtaaaagatccacatttaacatacttaaactacttaaacttagataacatcactctgaagtatactaccaaaatgttaattgagaaaagctgaaaatagttttagtttactcattatcacatgctagaagaaaattttgcatgagaaaacactgaagaggtaattttttaatccagatttttcacaaactcatggtgcaaaat

SEQ ID NO: 2997 - DNA, 484 bp, Homo sapiens
acagtggtccttttcagagttggacttctagactcacctgttctcactccctgttttaattcaacccagccatgcaatgccaaataatagaattgctccctaccagctgaacagggaggagtctgtgcagtttctgacacttgttgttgaacatggctaaatacaatgggtatcgctgagactaagttgtagaaattaacaaatgtgctgcttggttaaaatggctacactcatctgactcattctttattctattttagttggtttgtatcttgcctaaggtgcgtagtccaactcttggtattaccctcctaatagtcatactagtagtcatactccctggtgtagtgtattctctaaaagctttaaatgtctgcatgcagccagccatcaaatagtgaatggtctctctttggctggaattacaaaactcagagaaatgtgtcatcaggagaacatcataacccatgaaggataaaagccc

SEQ ID NO: 2998 - DNA, 470 bp, Homo sapiens
actaaaatctatagaaaatagataatttcattaaggtgcaattaaaatacttgaaattgggacacatctctatatttcaaaccaatatactggctttctttttaaaagactattctagtctttacgatgtccaaagtttttcctctttgcttttatttgctttagaccatatttaaatttttagcattcctaagtgcatacattttaggcatatactataatgaccaagagtttgtgaacctactgattaggtaaacactttggggaggtatgacctgcacaaagtagggtgggaaagctattatctcccttaatctggacacaactgttcaagcagtctataatttattagcttctctgatagcttcactatttggttttcattgaccttttgagcaactgactggcaaaccccagattcttttcgcctgaaatcttttcaagttagatactgtccatattacacttgt

SEQ ID NO: 2999 - DNA, 472 bp, Homo sapiens
  misc_feature 465: n = A,T,C or G
ggcggacctactgggctccatcctgagctccatggagaagccacccagcctcggtgaccaggagactcggcgcaaggcccgagaacaggccgcccgcctgaagaaactacaagagcaagagaaacaacagaaagtggagtttcgtaaaaggatggagaaggaggtgtcagatttcattcaagacagtgggcagatcaagaaaaagtttcagccaatgaacaagatcgagaggagcatactacatgatgtggtggaagtggctggcctgacatccttctcctttggggaagatgatgactgtcgctatgtcatgatcttcaaaaaggagtttgcaccctcagatgaagagctagactcttaccgtcgtggagaggaatgggacccccagaaggctgaggagaagcggaagctgaaggagctggcccagaggcaagaggaggaggcagcccagcaggggcctgtggntggtgag

SEQ ID NO: 3000 - DNA, 439 bp, Homo sapiens
tatgaagttgatgctactctgaagtctctcaacaaccagattgagacccttcttactcctgaaggctctagaaagaacccagctcgcacatgccgtgacttgagactcagccacccagagtggagcagtggttactactggattgaccctaaccaaggatgcactatggatgctatcaaagtatactgtgatttctctactggcgaaacctgtatccgggcccaacctgaaaacatcccagccaagaactggtataggagctccaaggacaagaaacacgtctggctaggagaaactatcaatgctggcagccagtttgaatataatgtagaaggagtgacttccaaggaaatggctacccaacttgccttcatgcgcctgctggccaactatgcctctcagaacatcacctaccactgcaagaacagcattgcataca

SEQ ID NO: 3001 - DNA, 437 bp, Homo sapiens
  misc_feature 36, 108, 154, 171, 189, 192, 231, 242, 280, 299, 366, 373,397: n = A,T,C or G
acaagcttttttttttttttttttttttttttttanatttacacagacgtttaattagctttatttacagagcagggattttttttttcagtctccaatggtacctanataacatcattaggcaagaatgccagtttaaaagaaatctatgcanaatcctaaaaataacanatgttggtgctcctcaanaanaggcaagcttgactatatcagcagctctctatgcctcanttactcaaaancaattctgttgcagtctctacatcccatgattttgaanacaaggccactattactgnattcctatcaaagcccatagcacataggttttctatttttttggggtattctggactaaaaactggngctccancatacacatgtgcccaaagtcganctgtctgtttgaacatttcgggattttgtttgtacctgcc

SEQ ID NO: 3002 - DNA, 190 bp, Homo sapiens
  misc_feature 13, 31, 58, 119, 142, 148, 159: n = A,T,C or G
ggcagttaaagantcatggatggaactagangtcactatattaagtgacataagccanaaacagacaaacattgcatgttctcaattatttgcgggatctaaaagtcaaaacaattganctcatggatatagagagtagaangatggntactagtggcngggaaaaggggtgtgcgaagggaactgggga

SEQ ID NO: 3003 - DNA, 290 bp, Homo sapiens
taaaaatgtgctcgtgtgtttagcctacgtttttctcatgcctccattaccagttgcaattgtgtatctaagacctccaagcttgtttttaaaacaaaacaaaaaacctttctctattatctcagaaatataaatactgttatttttaatattaagaaattcaatataacttttaacacacactgtggaacattaaaccgtataaaaatgtagttataactatttttaattccaaggtgttgtttgcttttttcttttaaatattttcttaatattttgtcagattaact

SEQ ID NO: 3004 - DNA, 503 bp, Homo sapiens
gcgtgggttgacatctgcaggccgaaagagccgtggccttggaaagggccacaagttccaccacactattggtggctctcgccgggcagcttggagaaggcgcaatactctccagctccaccgttaccgctaatataagtaaagtttgtaaaattcatacttaataaacaatttaggacagtcatgtctgcttacaggtgttatttgtctgttaaaactagtctgcagatgtttcttgaatgctttgtcaaattaagaaagttaaagtgcaataatgtttgaagacaataagtggtggtgtatcttgtttctaataagataaacttttttgtctttgctttatcttattagggagttgtatgtcagtgtataaaacatactgtgtggtataacaggcttaataaattctttaaaaggagagaactgaaactagccctgtagatttgtctggtgcatgtgatgaaacctgcagctttatcggagtgatggcaatcctctgctgg

SEQ ID NO: 3005 - DNA, 66 bp, Homo sapiens
  misc_feature 5, 29, 54: n = A,T,C or G
acagnccctctcctataagcaagaagctntcgtgtgctagtgtcaaaagccaangcagaccgtcct

SEQ ID NO: 3006 - DNA, 342 bp, Homo sapiens
acctcaggtgccaggcatgaggttctccgctgtctggagtcttgctttgggagtgctacacctgtgggagtgccccaggcaccacccaaaggcggggctctggctcaagcttgcatggtttacagagcctcacatgatgtcctttcaggtttgttgagttggggctagggactcggtggcagcagagcctggttctcctgcctgaccaggccttggcaggacgcctcttcccttctgtggagaagatggagaagcagagaagcaggatacagagcaggctggaaaggactagaagcctcatggtgagaaggcagattttcacgtcctgggaagggagctgtg

SEQ ID NO: 3007 - DNA, 303 bp, Homo sapiens
accgcggccgttaaacatgtgtcactgggcaggcggtgcctctaatactggtgatgctagaggtgatgtttttggtaaacaggcggggtaagatttgccgagttccttttactttttttaacctttccttatgagcatgcctgtgttgggttgacagtgagggtaataatgacttgttggttgattgtagatattgggctgttaattgtcagttcagtgttttaatctgacgcaggcttatgcggaggagaatgttttcatgttacttatactaacattagttcttctatagggtgatggatt

SEQ ID NO: 3008 - DNA, 455 bp, Homo sapiens
acagaagccatcctggaggatgagcagacacagcggcagaagctcacggccgagtttgaggaggctcagacctcggcatgtctgttacaagaagaattggagaagctccgcacagccggccccctagagtcttcagaaacagaggaggcctcacagctgaaggagagactagaaaaagagaagaagttaacaagtgacctggggcgcgccgccacgagactgcaggagcttctgaagacgacccaggagcagctggcaagggagaaggacacggtgaagaagctgcaggaacagctggaaaaggcagaggacggcagcagctcaaaggagggcacctctgtctgagtttcctctttggaaaaagaagttactgttcaacttaccaaaatgccttacacattccttacaaataaaccaaccaacctacacagcgttatccaggcccaacttccggt

SEQ ID NO: 3009 - DNA, 83 bp, Homo sapiens
  misc_feature 20, 26, 73, 74, 75: n = A,T,C or G
actgccgagcgcggccaacngagacntgtagcccgtggtgtccagcacgcctttggtggacttcttgatgcannntggaagat

SEQ ID NO: 3010 - DNA, 256 bp, Homo sapiens
  misc_feature 248: n = A,T,C or G
ggcccagcagccaccacagcgcctgcttcctcggccctgaaatcatgcccctaggtctcctgtggctgggcctagccctgttgggggctctgcatgcccaggcccaggactccacctcagacctgatcccagccccacctctgagcaaggtccctctgcagcagaacttccaggacaaccaattccaggggaagtggtatgtggtaggcctggcagggaatgcaattctcagagaagacaaagacccncaaaagat

SEQ ID NO: 3011 - DNA, 272 bp, Homo sapiens
acatttaaaaacaaaatcacttaaaggaccctttgactgatgcctctcagtttatatttttatgtgactttatatttcttttgatacacttgacattttaggaaattttgatgtgatttatcaaaacctttacttgatggttagagttcctgcatttatgaaatcaaatctgtaataacagaaatcctggaatactcttaatatatacttctattttgtgtttgttactgtgattaatatttgcaattgtatattttacatttaaattattt

SEQ ID NO: 3012 - DNA, 498 bp, Homo sapiens
accatttgcctcccgggctcaagcgattctcctgcctcagcctcccaagtagctgggattacaggcacctgccaccatgcccggctaatttttgtaattttagtagagacagggtttcaccatgttgcccaggctggtttcgaactcctgacctcaggtgatccacccgcctcggcctcccaaagtgctgggattacaggcttgagcccccgcgcccagccatcaaaatgctttttatttctgcatatgttgaatactttttacaatttaaaaaaatgatctgttttgaaggcaaaattgcaaatcttgaaattaagaaggcaaaaatgtaaaggagtcaaaactataaatcaagtatttgggaagtgaagactggaagctaatttgcattaaattcacaaacttttatactctttctgtatatacatttttttcctttaaaaaacaactatggatcagaatagccacatttggaacactttttgttatcagtcaata

SEQ ID NO: 3013 - DNA, 499 bp, Homo sapiens
actttcctagatgacatatcgagtcaacatgaagccttagctaaaatgaatgattcaggatattaatgagaaattctcacaaatgatatgcatttaggaaatgattttgctttccttaaatagttcgaaggcttgaaaataaactttttttttgcatttcttttagaatgtttggtcattaacaacttttaaccttatcttcctcttctccttagcccttaacagaccgagtccattctatttggaaataacaagaacttgatcagattattaaatcttggaaacctcatttttaccttataaagtgttaagtttcacgtgcatattctcttacaaatgtagtataaatgttatggatagatataaggaaatattggcatagtataggtaattagtgaaaagacacaacttcacaaaacataataaaagataaacatgaaactataacactacttaaaaaatattttctcccaaattattttagcatttttgactagtt

SEQ ID NO: 3014 - DNA, 505 bp, Homo sapiens
  misc_feature 265, 320, 356, 366, 402, 477, 502: n = A,T,C or G
acatattccttgcatttttttagttgttgtcttaaaaaaaaaaaaacaccgcacaacatctggagttcacaaaatctgaagctcacaactaaaccttcagtttactactaaaatagatctctctgcttattagaaacaatggtctgtagttaactttttttttttttttgcaaaaacaggataacaacgtcagatagcactttaatatactagaagaccaaatggaactaattttatttcatacatatattttacagtccagtanacaagatatattgtatttctctgctagtaaagtcatattctctccaaatatgtanacaagaggcttaatgtattataaaagtattatgaanagacattaanattgatgcaaactcaaaaaacacactcacacacaanacttttttttctgccatctttcaccctctaactcgcgatggctccacaaggttgacctgttacggctgttcccanacttgatcaccagctggaatacagngcg

SEQ ID NO: 3015 - DNA, 425 bp, Homo sapiens
ggctgaccagggctccctgacctatacaggcctctgctatgggggtgatggccagtcctggtgtctgagtgattcccagggcccagcaaagggaccaagtttccagagccctgaagacaaggggtaacactccaaaatatggactcattttccactccaccttcattggccgagcagctgccaagaacaaaggccgcatctcccgatacctggcaaacaaatgcagtattgcctcacgaatcgattgcttctctgaggtgcccacgagtgtattcggggagaagcttcgagaacaagttgaagagcgactgtccttctatgagactggagagataccacgaaagaatctggatgtcatgaaggaagcaatggttcaggcagaggaagcggctgctgagattactaggaagctggagaaacaggag

SEQ ID NO: 3016 - DNA, 546 bp, Homo sapiens
  misc_feature 264, 427, 453, 501: n = A,T,C or G
actccagcctggatgacagagccagacactgtctcaaaggaagaagaaaaaaaaaaaaaaaaaacaagagagagagagagagagagagagaactccctgatggagggactgtggcatgcaggcacattcactacattgctggcagtgttgtaaatgataccatctttctggagagcaatctgaccttatctaaggagaactatacagtttcttatctccacttttagaatataacacaaggaaatcattgtaaatgatagttgnttcttggttgtttttttttttgagacagtctcatgctgttgcccaggctggagtgaagtggtgtgatcttggctcacggcaacctccacctctcgggtccaagcgattctcccgcctcagcctcccaagtagctgggactacaggcgcctgccacaacgcccnggccaacctttgtatttttagcaganacgggatttcccatgatggccagtatagtctcaatctcttgacctcgngatctgccctcctcggcctcccaaagtgctgggattacaggtgtg

SEQ ID NO: 3017 - DNA, 452 bp, Homo sapiens
acatatacctaaaaagtggctatcctacatatgacagcccagaatttactaactccataggttttctggatatttcaagcacacattaaaacaattacagagaggacatacatttatgatttatgcaaattaaggcacatcaattacaatctatttttttaagttagtcagtttaaaaatcttcacttacaaaaattcaaaatatgtccaagctcaactttttagtaggaatgttagtttgttgggtttggccattttcttttttcaccttaaaggtcaaacatgaaacaatgaggaatgtaggtctttgtaaaacacataaatacctgtgatgttttgaatcatttggcccttaaaaatattgcttaacaagttaaacccagcttaattgtaggtaaatgcaagtatacccaaggctggactattttagtctgcttttggctgcagattgt

SEQ ID NO: 3018 - DNA, 473 bp, Homo sapiens
  misc_feature 462: n = A,T,C or G
cgcctataagctaccaggaggagctttacgacttcccgtcctgcgggaagtggcgggcacgatcgcaaggtagcgcagaagcttctcaatggccagcgccagctgcagccccggcggcgcactcgcctcacctgagcctgggaggaaaattcttccaaggatgatctcccactcagagctgaggaagcttttctactcagcagatgctgtgtgttttgatgttgacagcacggtcatcagtgaagaaggaatcggatgctttcattggatttggaggaaatgtgatcaggcaacaagtcaaggataacgccaaatggtatatcactgattttgtagagctgctgggagaaccggaagaataacatccattgtcatacagctccaaacaacttcagatgaatttttacaagttacacagattgatactgtttgcttacaattgcctattacaacttgctatanaaagttggtac

SEQ ID NO: 3019 - DNA, 473 bp, Homo sapiens; identical to SEQ ID NO: 175

SEQ ID NO: 3020 - DNA, 499 bp, Homo sapiens
acctcgttttcaggttcatccatctccagtggaatgttttcaataaaagatgaagaaaatgtgtgtgatctttaataacacatccctatagaaagtggataaaagatataccaaaactgtaatacagatatatacaaatataggtgcctttttgattactcttgtttgtctagtatggtcttggaaagaaaaccaagcaagcaagttgctgcctattctatagtaatattttattacacatgattgatatttttgtggtagggaagtgggatgctcctcagatattaaaggtgttagctgattgtattttatctctaaagatttagaactttagaaaatgccgacttcctccatctatttctgaaaggttctttgtggatttatatagagttgagctatataaacattaactttagatttgggatttaaaatgcctattgtaagatagaataattgtgaggctggattcactacacaagatgaacttcacttcataaat

SEQ ID NO: 3021 - DNA, 517 bp, Homo sapiens
acttcagttggtgcacaaaatactgtcatttgctcaaagctggctgccaaatgtttggtgatgaaggcagaaatgaatggctcaaaacttgggagaagagcaaaacctgaaggggccctccagaacaatggtgggctttatgatcctgactgcgatgagagcgggctctttaaggccaagcagtgcaacggcacctccacgtgctggtgtgtgaacactgctggggtcagaagaacagacaaggacactgaaataacctgctctgagcgagtgagaacctactggatcatcattgaactaaaacacaaagcaagagaaaaacctcatgatagtaaaagtttgcggactgcacttcagaaggagatcacaacgcgttatcaactggatccaaaatttatcacgagtattttgtatgagaataatgttatcactattgatctggttcaaaattcttctcaaaaactcagaatgatgtggacatagctgatgtggcttattattttgaaaaagatgttaa

SEQ ID NO: 3022 - DNA, 477 bp, Homo sapiens
acagaacatcgtcagcactagcacagtttacagaacctcacagacccaaaggaacatcaataggcaaagcgactacaggaggcgtgtgtccgcgtgggcgaggtaaagagggtcagtattggtcaagtgacagtgtcggtaatctggcaagacagtgatgttaagaaggttcatagtttaagaattatctaaaatattttaaaaactataaagctgcaacacatgatttttacacctagttactagaaaactaaggaaagcacttattagctctgaataaagtaacatggaaagcacttttactaatcgacaaaaaaaccttctaatgcattatcagaaagattttataatacaaggaggcatattgctcagtcagaaggggttctataagaaaagcacttactaagttagcgactaacagaacaaccagtttaaagatgaattaaatgcccaatttggggaggcatggcaggtgta

SEQ ID NO: 3023 - DNA, 250 bp, Homo sapiens
accactgcttgatttgcacttcaagtttggagttggactgctccagggtccgcaccttttctaggtagctcgccagacggtcatttaggttctgcatggccattttctcattgccaacaaacaggtccccgccgcctgtgagatcgctcccatagttcaccgtgtgtctggagttggagatgcggatgccccggcctccagcacccccataaacgctgggtgtcgtcccgaggcgctgcatgcccactgt

SEQ ID NO: 3024 - DNA, 486 bp, Homo sapiens
gcgcagtcagcattgttacagcaggtccattcagcttcggctctggaaagctatccagctcagcctgatgggtttcctagttatccttcagcgccaggaacaccattttctttgcaaccaagcctgtcccagagtgggtggcagtgaatacttttaacttttattctccttcagagcaacatcagaattgcctgagaactgcaatgaacaatctgacaaatgtgaagctggccaaaagtcggaaaatgagaatgagggtaatcctggagaaattgtgacaacaatttgaaaattgtggttgcattttaaagtgtgaacactcccctatgtaaatatgctgacaataaattgtatggagaatggtatttaaaaagtgtttggagacttttcacctgtcctataaaattttgaattgtgtatgtgatctacatagaaagaatattaaagagtaggttgaactctttatagccgaatacagccttaaat

SEQ ID NO: 3025 - DNA, 268 bp, Homo sapiens
gcgccgctccggctgcaccgcgctcgctccgagtttcaggctcgtgctaagctagcgccgtcgtcgtctcccttcagtcgccatcatgattatctaccgggacctcatcagccacgatgagatgttctccgacatctacaagatccgggagatcgcggacgggttgtgcctggaggtggaggggaagatggtcagtaggacagaaggtaacattgatgactcgctcattggtggaaatgcctccgctgaaggccccgagggcgaaggt

SEQ ID NO: 3026 - DNA, 297 bp, Homo sapiens
acttgctggtctcaaatttccacaaggagatatcaatggtgataccacgttcacgctcagctttcagtttatccaagacccaggcatacttgaaggagccctttcccatctcagcagcctccttctcaaatttttcaatggttcttttgtcgatgccaccgcatttatagatcagatggccagtagtggtggacttgcccgaatctacgtgtccaatgacgacaatgttgatatgagtcttttcctttcccattttggcttttaggggtagttttcacgacacctgtgttctggcgg

SEQ ID NO: 3027 - DNA, 230 bp, Homo sapiens
  misc_feature 107, 178, 192, 193, 199, 203: n = A,T,C or G
actgctgtcactgtttaagtgtatttcagttctgttactccaattcatacacacagtcttccatgaggatggtaggatgaacctggttagctggctttggataagtngatcagcatgactacctggaataaaagtgactgactctaggataaaaattaaaaaaagattctttcacagnaacgagtctttgcnnaacctntctnctaataatcacaaaccaggggaagaaa

SEQ ID NO: 3028 - DNA, 555 bp, Homo sapiens
acacatcatcggaaaacagactgataaatgcaaaccctgtgtgaaaggcacatggcactaatattgctcacacctgctacacctccttgggagccaagggaagccttttctgcaatctccccattttgatagaaacttatcacaaatttttttatagcaaaatatttaaaggtctctttccctgctcttcacttatctactaggaaggtatagaattaaaaagctttttttcccccagctgtgatcaagatgtattaaaagaatatgaaagagcatctgggttattctagaagttctgtgatcaaaacatattaaaaaaaattaaagcgcatctgggttattctagaagttcctgggctttatacttggatatttacagaggaagttgaacttcaagttctgccactcttcaaaatgggtgacaggagaggacgtgataggacagttaaaaaaaaattgatagtcattctctgatggagtgaagcaagctttgtcaaccatcaacaaatatgacttcattggtcacaagccctgcagagatccaacaagatttga

SEQ ID NO: 3029 - DNA, 549 bp, Homo sapiens
  misc_feature 505: n = A,T,C or G
acattgaagaccttaagaagtttctaaaaccatatactttagaagaacagaagaacctcacagtctgtcctgatggagcactttttgaacagaagggtccagtttatgttgcatgtcagtttcctatttcattacttcaagcatgcagtggtatgaatgatcctgattttggctattctcaaggaaacccttgtattcttgtgaaaatgaacagaataattggattaaagcctgaaggagtgccaaggatagattgtgtttcaaagaatgaagatataccaaatgtagcagtttatcctcataatggaatgatagacttaaaatatttcccatattatgggaaaaaactgcatgttgggtatctacagccattggttgctgttcaggtcagctttgctcctaacaacactgggaaagaagtaacagtttgagtgcaagattgatggatcagccaacctaaaaagtcaggatgatcgtgacaagtttttgggacgagttatgttcnaaatcacagcacgtgcatagtatgagtaggatatctccacagag

SEQ ID NO: 3030 - DNA, 518 bp, Homo sapiens
  misc_feature 486: n = A,T,C or G
atttttgctggaaagttggatctatcctcagtaactctgccatgaattcctgtttcctggttccagaaaaagaaaagattacatttctgatcataaagaatgtcttgcatatgggaaatttttcaaaataaggggggtattatttatgtggcatgggaaaacttttgccatggctgtttgtcttagtggcatcttttgatgacattggatcagatatatgtagatgctgatatatgggacacatgtttaggttttggtgcagttgcacaaaactgtgttagtttatatgttactgtgttgcctttatttattctctccaaagtgtctctttatatttgttttacaatctgtgaaagagtataccataatacagaagtattttcatagtctttacctctggattgtcctgtcagtatagccacgttgatgagattacaccagtgcctttgatcatctttaagtatttgagccctgataaatattttngtaacataatccaaattagagacttagagctc

SEQ ID NO: 3031 - DNA, 442 bp, Homo sapiens
  misc_feature 271: n = A,T,C or G
acatataaatgaatctggtgttggggaaaccttcatctgaaacccacagatgtctctggggcagatccccactgtcctaccagttgccctagcccagactctgagctgctcaccggagtcattgggaaggaaaagtggagaaatggcaagtctagagtctcagaaactcccctgggggtttcacctgggccctggaggaattcagctcagcttcttcctaggtccaagccccccacaccttttccccaaccacagagaataagagtttgtnctgttctgggggacagagaaggcgcttcccaacttcatactggcaggagggtgaggaggttcactgagctccccagatctcccactgcggggagacagaagcctggactctgccccacgctgtggccctggagggtcccggtttgtcagttcttggtgctctgtgttccag

SEQ ID NO: 3032 - DNA, 166 bp, Homo sapiens
  misc_feature 99, 108, 110, 133, 144: n = A,T,C or G
cttaacatgcctgtgacagctgaaacccttatacaaatcctttagctaataactacagcaggcgctatttgtgctatggaaataaagcacgattcttanatgacattntntctctccccttttttccccctancctcaatctangctcacttatctaaagaatatg

SEQ ID NO: 3033 - DNA, 367 bp, Homo sapiens
  misc_feature 254, 275: n = A,T,C or G
ctggatctggatcctggtcaaactttaatttattatgttgatgaaaaagcacctgaattctcaatgcagggtctaaaagctggtgttattgctgttattgtggttgtggtgatagcagttgttgctggaattgttgtgctggttatttccagaaagaagagaatggcaaagtatgagaaggctgagataaaggagatgggtgagatgcatagggaactcaatgcataactatataatttgaagattatagaagnagggaaatagcaaatggacanaaattacaaatgtgtgtgcgtgggacgaagacatctttgaaggtcatgagtttgttagtttaacatcatatatttgtaatagtgaaacctgt

SEQ ID NO: 3034 - DNA, 327 bp, Homo sapiens
ttcaaccaaatactttaatgtataaaataaatattatacaatatacttgtatagcagtttctgcttcacatttgattttttcaaatttaatatttatattagagatctatatatgtataaatatgtattttgtcaaatttgttacttaaatatatagagaccagttttctctggaagtttgttgaaatgacagaagcgtatatgaattcaagaaaatttaagctgcaaaaatgtatttgctataaaatgagaagtctcactgatagaggttctttattgctcattttttaaaaaatggactcttgaaatctgttaaaataaaattgt

SEQ ID NO: 3035 - DNA, 359 bp, Homo sapiens
acaagtttaatgtttagttctagaaattttgtgcaatatgttcataacgatggctgtggttgccacaaagtgcctcgtttacctttaaatactgttaatgtgtcatgcatgcagatggaaggggtggaactgtgcactaaagtgggggctttaactgtagtatttggcagagttgccttctacctgccagttcaaaagttcaacctgttttcatatagaatatatatactaaaaaatttcagtctgttaaacagccttactctgattcagcctcttcagatactcttgtgctgtgcagcagtggctctgtgtgtaaatgctatgcactgaggatacacaaaaataccaatatgatgtgt

SEQ ID NO: 3036 - DNA, 541 bp, Homo sapiens
ggaatgggaggcatccagaacgagaaggagaccatgcaaagcctgaacgaccgcctggcctcttacctggacagagtgaggagcctggagaccgagaaccggaggctggagagcaaaatccgggagcacttggagaagaagggaccccaggtcagagactggagccattacttcaagatcatcgaggacctgagggctcagatcttcgcaaatactgtggacaatgcccgcatcgttctgcagattgacaatgcccgtcttgctgctgatgactttagagtcaagtatgagacagagctggccatgcgccagtctgtggagaacgacatccatgggctccgcaaggtcattgatgacaccaatatcacacgactgcagctggagacagagatcgaggctctcaaggaggagctgctcttcatgaagaagaaccacgaagaggaagtaaaaggcctacaagcccagattgccagctctgggttgaccgtggaggtagatgcccccaaatctcaggacctcgcccaagatcatggcagacatc

SEQ ID NO: 3037 - DNA, 332 bp, Homo sapiens
acagttagtgggagcacactatataactcctttgcatgacaccattcaacaatattttttaaaatctacaaaattttaaagtttcacttccctagcaaaatatcttcagtcaagaaattagtctttgaaaattatgaaaattgttgtgggaaatatttatacaaattattactgataatgcacatatattttgaaacattgtttctagaagcaataaaatataacctatttaggagataacccaaatgatttgtaaaaaaattaacttgtagaaaagggaaggatgttgtgtaaaatcaagtcaattatttgaggtttttataatattgagt

SEQ ID NO: 3038 - DNA, 135 bp, Homo sapiens
accttttgaccccatggaaaaaaaatatctaacgttcagaactaccaataacaggaagaagagaaatttttttttttttttttgagaatgaaatgtttcccatcatagtggattcttaagcacgttctccacgta

SEQ ID NO: 3039 - DNA, 444 bp, Homo sapiens
actctgaggcttgtaggagggtaaaatagagacccagtaaaattgtaataagcagtgcttgaattatttggtttcggttgttttctattagactatggtgagctcaggtgattgatactcctgatgcgagtaatacggatgtgtttaggagtgggacttctaggggatttagcggggtgatgcctgttgggggccagtgccctcctaattggggggtaggggctaggctggagtggtaaaaggctcagaaaaatcctgcgaagaaaaaaacttctgaggtaataaataggattatcccgtatcgaaggcctttttggacaggtggtgtgtggtggccttggtatgtgctttctcgtgttacatcgcgccatcattggtatatggttagtgtgttggttagtaggcctagtatgaggagcgttatggagtggaagtgaaatcaca

SEQ ID NO: 3040 - DNA, 502 bp, Homo sapiens
acctgggtgttccccaccttgggcatcatgcaccacaacaaacaggccactgagaatgcaaaggaggaagtgaggcgaattctggggctgctggatgcttacttgaagacgaggacttttctggtgggcgaacgagtgacattggctgacatcacagttgtctgcaccctgttgtggctctataagcaggttctagagccttctttccgccaggcctttcccaataccaaccgctggttcctcacctgcattaaccagccccagttccgggctgtcttgggggaagtgaaactgtgtgagaagatggcccagtttgatgctaaaaagtttgcagagacccaacctaaaaaggacacaccacggaaagagaagggttcacgggaagagaagcagaagccccaggctgagcggaaggaggagaaaaaggcggctgcccctgctcctgaggaggagatggatgaatgtgagcaggcgctggctgctgagcccaaggccaaggacc

SEQ ID NO: 3041 - DNA, 291 bp, Homo sapiens
acatcggtctggccgggctcgccactgacgtccagacagttgcccagcgcctcaagttccggctgaacctgtatgagttgaaggaaggtcggcagatcaaaccttataccctcatgagcatggtggccaacctcttgtatgagaaacggtttggcccttactacactgagccagtcattgccgggttggacccgaagacctttaagcccttcatttgctctctagacctcatcggctgccccatggtgactgatgactttgtggtcagtggcacctgcgccgaacaaatgt

SEQ ID NO: 3042 - DNA, 376 bp, Homo sapiens
gccgctgctgccgccgccgccgcccagagactgctgagcccgtccgtccgccgccaccacccactccggacacagaacatccagtcatggataaaaatgagctggttcagaaggccaaactggccgagcaggctgagcgatatgatgacatggcagcctgcatgaagtctgtaactgagcaaggagctgaattatccaatgaggagaggaatcttctctcagttgcttataaaaatgttgtaggagcccgtaggtcatcttggagggtcgtctcaagtattgaacaaaagacggaaggtgctgagaaaaaacagcagatggctcgagaatacagagagaaaattgagacggagctaagagatatctgcaatgatgt

SEQ ID NO: 3043 - DNA, 393 bp, Homo sapiens
acactcagtctaactctgtgtgctacgccaagaacgggcaggttatcggcattggagcaggacagcagtctcgtatacactgcactcgccttgcaggagataaggcaaactattggtggcttagacaccatccacaagtgctttcgatgaagtttaaaacaggagtgaagagagcagaaatctccaatgccatcgatcaatatgtgactggaaccattggcgaggatgaagatttgataaagtggaaggcactgtttgaggaagtccctgagttactcactgaggcagagaagaaggaatgggttgagaaactgactgaagtttctatcaactctgatgccttcttccctttccgagataacgtagacagagctaaaaggagtggtgtggcgt

SEQ ID NO: 3044 - DNA, 169 bp, Homo sapiens
actatttagactgtatagactgatttagattacatactttagaggattaaggaaaccatagagtttgggccttggaactgttactgccttgtcctagagttgtcctgatcaggcttggggcctagttacagattagtcttaaagaattgcattaacttaaaaaaatcaa

SEQ ID NO: 3045 - DNA, 388 bp, Homo sapiens
acttaggcttggctgccctgtctggaacatggactttcttgcatgaatcagatgtgtgttctcagtgaaataactaccttccactctggaaccttattccagcagttgttccagggagcttctacctggaaaagaaaagaaatgaatagactatctagaacttgagaagattttattcttatttcatttattttttgtttgtttatttttatcgtttttgtttactggctttccttctgtattcataagattttttaaattgtcataattatattttaaatacccatcttcattaaagtatatttaactcataatttttgcagaaaatatgctatatattaggcaagaataaaagctaaaggtttcccaaaaaaaaaaaaaaaaaaaa

SEQ ID NO: 3046 - DNA, 374 bp, Homo sapiens
ttttttttttttttttagaaaaagtcatggaggccatggggttggcttgaaaccagctttggggggttcgattccttccttttttgtctagattttatgtatacgggttcttcgaatgtgtggtagggtggggggcatccatatagtcactccaggtttatggagggttcttctactattaggacttttcgcttcgaagcgaaggcttctcaaatcatgaaaattattaatattactgctgttagagaaatgaatgagcctacagatgataggatgtttcatgtggtgtatgcatcggggtagtccgagtaacgtcggggcattccggataggccgagaaagtgttgtgggaagaaagttagatttacgccgat

SEQ ID NO: 3047 - DNA, 278 bp, Homo sapiens
  misc_feature 207: n = A,T,C or G
acccagtttagaggatggccatttcacttaggtgggtttatctggacacctttttcactatctggagaagaagacacatactggttgttcagggctgctgtggtcacagagaaaagcggacagcaaatgaccaggctgggcagggctgcttctgtgtgatcagagaccttcacagccgggagtgaggccttacgccacacctgcctntccgtgtcccagccaggagctcctggtcaactctgaaaaaggcacattccctaccttggcatattaacact

SEQ ID NO: 3048 - DNA, 307 bp, Homo sapiens
actttgttctaaatcaatcttattttggttgtaaacagttgcatatataaaatacaggtaatcattctatttaccaagagtgaaatcaagcattctaaagtgattcatttagagacctgtaaatacactgaattttaaaaattacaaaatgtaaagtatactactgggccctatagaatttggcatttttaaagactgatatggtaattcatatttctgcagttgtaacatgaaatgatatattaatcccagaaatatttaaggaaattgttaatagacaaaaaagttaattatgtaatttatctgt

SEQ ID NO: 3049 - DNA, 480 bp, Homo sapiens
  misc_feature 456: n = A,T,C or G
acacatcctgttgagatcttctatactccagaaccagagagagattatcttgaagcagcaattcgaacagttatccagattcatatgtgtgaagaggaagagggagatcttcttcttttcttaactggtcaagaggaaattgatgaagcctgtaagagaataaagcgtgaagttgatgatttgggccctgaagttggtgacattaaaatcattccattgtattctacacttccacctcagcagcagcaacgcatttttgagcctccacctcccaaaaaacagaatggagcaattggaagaaaggtagttgtgtcaactaacatagcagagacgtctttgacaatagatggtgtggtgtttgtgattgatcctggatttgcgaaacagaaggtctacaatcctcgaatcagagttgagtcccttttggtgacagctattagtaaagcttcagctcancaaagggctggtcgagctggacgt

SEQ ID NO: 3050 - DNA, 404 bp, Homo sapiens
  misc_feature 374, 382, 389, 395: n = A,T,C or G
acttttgagctactattatttgaaaaaaatctgccaaatagcatctttaggatatatttacattttcactcatctaaaaagtatacaaaaataaaaagtggaaaaaggtatcttctgaatgttcaagagcatcctatagtgccaaataataaagcaccatttttttcttcataaccaggattaaaattcatatatactgcagggcagacatacatatgatagcttgtgctgattaatttaaccccatttgtaaacagatgaaaattttattttcttatttcatttataagatggctcaatgtattgggaggcttcttttttattacagaaagtgtatattggtatataataaatgaacttttcaaatgacaaanaaaaaaanaaaaaanaaaaangcttgtaca

SEQ ID NO: 3051 - DNA, 435 bp, Homo sapiens
acaacaaaggaaaaaacaaaacaaaacaaaacaaaaaacaaaaacagaaccgcaaatggaaggaaacaagagggaatgaagggggaagagggaaaaagagaaggcggaaacgtagttttaagttaagactcatgcaagaaactccccaggaagggaaaacaaaacgtctagaagaacccaaagaccccaactctccctcaaaccaaaccaatcaaaaccaaaaaaagaggaaaaggaataaaaaatgtaaaacttatatctaagaaaaaataacagaaaggaacaggggcggggatcatgtcgttatttgtgggattaatattattatttgggagaacacagactttttgcataccattgactcatgtgggccgttaatgcacttatattcccagcttgtaagctaacattatagtaaataaatacacagtccgg

SEQ ID NO: 3052 - DNA, 172 bp, Homo sapiens
acacgggtctatttggcagtgaccttgctctggagacgatgatattccttcagcctgagggaattgatgttgatgaacccggtggcatcagttggctcataatcaccctgcacgttcatgctcaccagctcctcattgtagagagacagtggggactcccggccgaggatgt

SEQ ID NO: 3053 - DNA, 122 bp, Homo sapiens
  misc_feature 1, 11, 33, 36, 43, 61, 89, 100, 104: n = A,T,C or G
nacaaacccangcctgggcctaggaaagggcanaanaaaggcnaagggtcccttggagcangaacccatccctctctgcttatacccancacccgtcatnccangttcctttcttcaacctc

SEQ ID NO: 3054 - DNA, 266 bp, Homo sapiens
ctgctgcggccgcagccatgagtatgctcaggcttcagaagaggctcgcctctagtgtcctccgctgtggcaagaagaaggtctggttagaccccaatgagaccaatgaaatcgccaatgccaactcccgtcagcagatccggaagctcatcaaagatgggctgatcatccgcaagcctgtgacggtccattcccgggctcgatgccggaaaaacaccttggcccgccggaagggcaggcacatgggcataggtaagcggaagggt

SEQ ID NO: 3055 - DNA, 239 bp, Homo sapiens
actaggttcttaggaaacaacagaattcctcaaatgcctaaaacaaagaaaatagaaacccagaaaacaaaacaaaataaaacaaaaccatcagaactgtgagtggaaactaaggtgatgatctgggagcaatacactaaaatcttgtgtcgagtcctatatgaaggctggcagtggagctaaacctgggcatgctgaagacaagggagctgaaccagggctcctacatgaagcaggga

SEQ ID NO: 3056 - DNA, 475 bp, Homo sapiens
  misc_feature 74: n = A,T,C or G
ctttttttttttttttttttttgaaagtttaacctgataatttatttgtggggaaaaaagctagttttgatganaaaaagttcagtcctttccttgtaaacacaaagaaactcaacaggaattttaaaaatagtaggtcagaaaatgcaacagtaactcttataattcttttcaattaaacagacaaatcaagttgaagacaagtgttaaaatactattcagcctaaatatttatcagtctatatatcctgttgttcaattggcttttgatttttaaaaaaatcaaatcaataaactttgtaagagctaccacatttcaagtgatgaaaataaattagttcccccccaaagatattgtttaacttctaaagcataaaaagctctataatatcttatacaaattaaccagtgtttttacaaaagtaatgcagttttggactgatgatattacactgtatttgtggtaaagtacctg

SEQ ID NO: 3057 - DNA, 284 bp, Homo sapiens
acttataaagtagtagtgtttcctagtatctgtaatttgagcaatagtaaaacacgtaagtaaaatcaggagaagccattctggaaaacacaggggtaacagaaattaagtaatcaagaccacattctgccagctagaagcaaataactaaattgactaacatgccatgcatgagcaaaaccttcctccataaaagggattgacaaactctttaaaaggccaggcagtattttgactgttggaagccatacagactctgctatactactaaactcagccactgt

SEQ ID NO: 3058 - DNA, 387 bp, Homo sapiens
  misc_feature 206: n = A,T,C or G
gtgaagaagatcaggctgctgagcttcgtgcttatctgaaatctaaaggagctgagatttcagaagagaactcggaaggtggacttcatgttgatttagctcaaattattgaagcctgtgatgtgtgtctgaaggaggatgataaagatgttgaaagtgtgatgaacagtgtggtatccctactcttgatcctggaaccagacaancaagaagctttgattgaaagcctatgtgaaaagctggtcaaatttcgcgaaggtgaacgcccgtctctgagactgcagttgttaagcaaccttttccacgggatggataagaatactcctgtaagatacacagtgtattgcagccttattaaagtggcagcatcttgtggggccatccagt

SEQ ID NO: 3059 - DNA, 494 bp, Homo sapiens
  misc_feature 59, 120, 123, 176, 184, 294, 318, 333, 425, 447, 468: n = A,T,C or G
acttcagttggtgcacaaaatactgtcatttgctcaaagctggctgccaaatgtttggngatgaaggcagaaatgaatggctcaaaacttgggagaagagcaaaacctgaaggggccctncanaacaatgatgggctttatgatcctgactgcgatgagagcgggctctttaaggncaagcagngcaacggcacctccacgtgctggtgtgtgaacactgctggggtcagaagaacggacaaggacactgaaataacctgctctgagcgagtgagaacctactggatcatcatngaactaaaacacaaagcaagaganaaaccttatgatagnaaaagtttgcggactgcacttcagaaggagatcacgacgcgttatcaactggatccaaaatttatcacgagtattttgtatgagaataatgntatcactattgatctggttcanaattcttctcaaaaaactcanaatgatgtggacatagctgatgtggc

SEQ ID NO: 3060 - DNA, 488 bp, Homo sapiens
acaaactggaagataattttataaaaccgtaaagagatctttgtaaattgcagtgtgtctgcttataaacaaatcaaatcgatctccatttcttcaagtgtcaaaaacaaaagagtagctggacattggtttttataatcagtttcagagaaaatacaggaataatgatcaatggcattttgaagcagataaaactgccaagttttatgcttgagtctatcattctgtgatttgctataatagtattcctttctattaggtgttcccgacaatattagttctatattcatttgatatgagcatttatattaaacttcaaaattacctcggatagtatccagaatatatgtcagaaacccctaaaagcaacttctattttcctcttaattaagataatatttagtcatgttaataactattgaaatgacaaggtcagattttcaaaaccagtagggtgctttgcagtgaacgtgcatatgctggagcat

SEQ ID NO: 3061 - DNA, 530 bp, Homo sapiens
actttcctagatgacatatcgagtcaacatgaagccttagctgaaatgaatgattcaggatattaatgagaaattctcacaaatgatatgcatttaggaaatgattttgctttccttaaatagttcgaaggcttgaaaataaactttttttttgcatttcttttagaatgtttggtcattaacaacttttaaccttatcttcctcttctccttagcccttaacagaccaagtccattctatttggaaataacaagaacttgatcagattattaaatcttggaaacctcatttttaccttataaagtgttaagtttcacgtgcatattctcttacaaatgtagtataaatgttatggatagatataaggaaatattggcatagtataggtaattagtgaaaagacacaacttcacaaaacataataaaagataaacatgaaactataacactacttaaaaaatattttctcccaaattattttagcatttttgactagtttaataatatgaacactgccaaaaaatgggtt

SEQ ID NO: 3062 - DNA, 312 bp, Homo sapiens
gaacagttgaggcactacactaaatcaaaccataaatgaggaaaaaacttttaatgttcttttctagaagtgttcaaataggtcttgatatgaagctaaaagccttatttatattatcttaatatttcggctaaaatgttaagctccataacatgaattgatacaattccaattttatcaatattttgtgatagaaaaatgttaatattattcatgagttatacagtccttacattttttcccttggtgtaggaacaacggaggagtttctcctctgctaactattcatatatgtaactgtaacaaaagtgt

SEQ ID NO: 3063 - DNA, 577 bp, Homo sapiens
  misc_feature 132, 285, 438, 445, 514, 515, 529: n = A,T,C or G
acattctgatatttttaaatctttaactttttaaagttaaaaacctacagctgcttaggtccagcttcttaactctttttgagacacttcctgtcctatctccactgtgcctgcctaaatttgttctcaccnagcactgcctgtgcatgcagagaaaatctgtgcatcctcttttatatttttaaaatactgtttaacatttgtgagaattttatgaaaatgcttttgtatgagctgtggctttttcccattgtgaagcattgaatatcacattttggaacatgntatagggtgagtccctggatctttgctcaccagatccaagcactgcttctcggtgtcattgcagtgtgctgcttgtcacccagaatactactatcatgtgaattctttttgtcgtcagtgtcttttccttagtctttttgttgttgttgttgntggttgntttaatcattccttttttaagaagaagtaattttccatttatgaagcagtatgaattagatgtattttnnaaacaggtccctantacaattcttcagatcatttttaaaatgactaagtcattttagtatgt

SEQ ID NO: 3064 - DNA, 242 bp, Homo sapiens
  misc_feature 77, 78, 91, 204, 208: n = A,T,C or G
acagcgacgtggtgatgtagaggcgcttcccatccaggctgagctggatcatctgagggcctccagccacccgtttnnccttgaccactangggctctggctgggactttagttcctcgtcctccagcacttgcacagggcctcccttaacaatgctgcctccgaggaagagctgtcctgtgaggcggggtctctgtgggtcanagangtcatactgcctcaggtccccatgcagccagttg

SEQ ID NO: 3065 - DNA, 461 bp, Homo sapiens
  misc_feature 397: n = A,T,C or G
accaataccaccaattttgtagacatcctggagaggcaggcgcaagggcttgtcagttggacgagttggtggtaggatgcagtccagagcctcaagcagcgtggttccactggcattgccatccttacgggtgactttccatcccttgaaccaaggcatgttagcacttggctccagcatgttgtcaccattccaaccagaaattggcacaaatgctactgtgtcggggttgtagccaattttcttaatgtaagtgctgacttccttaacaatttcctcatatctcttctggctgtagggtggctcagtggaatccattttgttaacaccgacaattagttgtttcacacccagtgtgtaagccagaagggcatgctctcgggtctgcccattcttngagataccagcttcaaattcaccaacaccagcagcaacaatcaggacagcacagtcagcctgag

SEQ ID NO: 3066 - DNA, 423 bp, Homo sapiens
acagtagcatgaatcttgggtatttcgcataatcagttaggtcaagtgaagaagtcgaaaatgtgataagaaatttgtgtgtgtgtgcacatgtaaatctgtaagccagttgacccaagagcaactgaaacatctaatttgttcagctgagatcagacattgttaaatttccattttttagaaggcaattaaaaattacaattccaacagcccacaaaccaaacaaaaaaaactgtagagagaaattaaaactatattcaaagagcctttttttttcagctcaatttcagcaccccaaggaaaataaaagcatccatgaccatcacagatgaaaacaaaatgaatgtcattggaatcagttatttttccccactgaggtataaaatctatatagaaatttgatactatactataacaaattgt

SEQ ID NO: 3067 - DNA, 523 bp, Homo sapiens
  misc_feature 516: n = A,T,C or G
acttatgataacagcttgaagaggactgcaactctcccctcacgaatggtgacagagttggcttgtcacacctggctcagggaagaaaaatgagtaaacccctacctctttactcttgattcctcttccaccctaatactgttaacacatcatcctgtgtgattcaaataatctggcagatgaaatacagaaaatctaagtcatattgttcttatcactctatggccagatattatactaatctaattttaaaaatccttttctgtgcaatagaaataaccaaagctcattctgtctcctttcctttctaatgctgttgataggaacaaaatatcaagtaaggatacatgctagagatgttaaattcatacaagtaaagtaaattacaaagagaggtggtaatatttttttctagaatttcacaataaaatccctctcaccatgaaaatctttttataattttaacaggaaacttaaaagacattttgttgcaagactatcttaacaattataagnataatgc

SEQ ID NO: 3068 - DNA, 282 bp, Homo sapiens
actctgaggcttgtaggagggtaaaatagagacccagtaaaattgtaataagcagtgcttgaattatttggtttcggttgttttctattagactatggtgagctcaggtgattgatactcctgatgcgagtaatacggatgtgtttaggagtgggacttctaggggatttagcggggaccactgcacccagcctgtattgaatctttgtaacagaaaagtatttaaacacatctgaaatatgttgttaaaaaataacataatttatggggagcttactgagt

SEQ ID NO: 3069 - DNA, 222 bp, Homo sapiens
acaagtcatcgagctgctgttggttccacttgaggtcagggatgaggacaaaaccatcagagggatctgggttctcgaaaacaatccggtccgcttcagccttcttgtcgagaatgttatacacccactggatgctgaggctctgggactccaggtggggtaaagtaatattcctgtagtcatctcccgtctctcggatcaggcggaggtcctggcgcaggt

SEQ ID NO: 3070 - DNA, 357 bp, Homo sapiens
  misc_feature 309: n = A,T,C or G
acagagcacatttgtcagtatttttgccggctggtgaattcaaacaacctgcccaaagattgatttgtgtgtttgtgtgtgtgtgtgtgtgtgtgtgtgtgtgtgagtggagttgaggtgtcagagaaaatgaattttttccagatttggggtataggtctcatctcttcaggttctcatgataccacctttactgtgcttatttttttaagaaaaaagtgttgatcaaccattcgacctataagaagccttaatttgcacagtgtgtgacttacagaaactgcatgaaaaatcatgggccagagcctnggccctagcattgcacttggcctcatgctggagggaggctgggcgggt

SEQ ID NO: 3071 - DNA, 336 bp, Homo sapiens
accacaatgccaggcctcagtgagaaatctaccactttccacagtagccccagatcaccagccacaacactctcacctgccagcacgacaagctcaggcgtcagtgaagaatccaccacctcccacagccgaccaggctcaacgcacacaacagcattccctgacagcaccaccacgccaggcctcagtcggcattctacaacttcccacagcagcccaggctcaacggatacaacactgttacctgccagcaccaccacctcaggccccagtcaggaatcaacaacttcccacagcagcccaggttcaactgacacagcactgtcccctggcagt

SEQ ID NO: 3072 - DNA, 438 bp, Homo sapiens
  misc_feature 33, 47, 76, 199, 213, 259, 349, 378, 402, 407, 412, 420, 435: n = A,T,C or G
gctttttttttttttttttttttttttttctgntatacaaagagcanatttttattgaacttgtgcaataactatnttaccatacaatataaatattcatgaatagtttcccaagtctggagcgaccacatagggagaaaatgtaaatgtctcaatttttgttcacaaaagtatattttatcaaattgctgtaagctgnggatagcttaaaanaaaaaagtttcctgaaatctgggaaacaagacatttaaagaatcancaaaatttcaaataaaaaattatgaaaatattatcctcattagttcatttagtcccatgaaattaattattttctctgcttgatcttggnggacagtttcatgaagctgtcagttagtncattaaagttttggaaattctcanacagngcagnggtatcanaaacttgtattcaanaat

SEQ ID NO: 3073 - DNA, 153 bp, Homo sapiens
actccggggggagggcctgagaacgatccgctttatcagcagttctaaagccttattacctgagatttatattctggggggaaaaatcaagattggattatcaatacgtatttcacaggagatttgagttttggccctgacagaagaacacgt

SEQ ID NO: 3074 - DNA, 261 bp, Homo sapiens
acagttaactgacttagaaaaatagataaagcccttaaggattttaaaacacaacataaatttttatgtaaagaacatttaaaaatattttagatggtaaccaaaactaacttacacaaactatttttgatgtagaatagaatgctgttctataataagaagtctgtagcacactggtaatccatttggatctacagaatacttgtttggaacagaatctgataatgagagaaaactcaaatgaatgtcagtgcagttgct

SEQ ID NO: 3075 - DNA, 437 bp, Homo sapiens
acgtctctgaccgagagggaagcgatgccacgggagatggaaccaaggagaaaccatttaaaacaggtctaaaggctttgatgacagtagggaaagaaccatttcctaccatttacgtagattcacaaaaagaaaatgagaggtggaatgttatttctaaatcacagttgaagaacattaaaaagatgtggcatagggaacaaatgaagagtgaatcccgggaaaagaaagaggcagaagatagtttacgaagagaaaagaacctggaagaagcaaagaagattaccattaaaaatgatccaagtctcccagagccaaaatgtgtgaagattggtgcgttagaaggatatagaggccaaagagtaaaggtgtttggctgggtccacaggctgcgcaggcaaggaaagaatttaatgtttctggtgttgcgagatggt

SEQ ID NO: 3076 - DNA, 504 bp, Homo sapiens
acttcagttggtgcacaaaatactgtcatttgctcaaagctggctgccaaatgtttggtgatgaaggcagaaatgaatggctcaaaacttgggagaagagcaaaacctgaaggggccctccagaacaatgatgggctttatgatcctgactgcgatgggagcgggctctttaaggccaagcagtgcaacggcacctccatgtgctggtgtgtgaacactgctggggtcagaagaacagacaaggacactgaaataacctgctctgagcgagtgagaacctactggatcatcattgaactaaaacacaaagcaagagaaaaaccttatgatagtaaaagtttgcggactgcacttcagaaggagatcacaacgcgttatcaactggatccaaaatttatcacgagtattttgtatgagaataatgttatcactattgatctggttcaaaattcttctcaaaaaactcagaatgatgtggacatagctgatgtggcttattatttt

SEQ ID NO: 3077 - DNA, 293 bp, Homo sapiens
  misc_feature 241, 288, 289: n = A,T,C or G
acaaggaatgaaagtgtcacgggtaaaaactctaaaaggttaatttctgtcaaatgcagtagatgatgaaagaaaggttggtattatcaggaaatgttttcttaagcttttcctttctcttacacctgccatgcctccccaaattgggcatttaattcatctttaaactggttgttctgttagtcgctaacttagtaagtgcttttcttatagaaccccttctgactgagcaatatgcctncttgtattataaaatctttctgataatgcattagaaggtttttttgnngatt

SEQ ID NO: 3078 - DNA, 373 bp, Homo sapiens
  misc_feature 324: n = A,T,C or G
actattgacccagcgatgggggcttcgacatgggctttagggagtcataagtggagtccgtaaagaggtatctttactataaaagctattgtgtaagctagtcatattaagttgttggctcaggagtttgatagttcttgggcagtgagagtgagtagtagaatgtttagtgagcctagggtgttgtgagtgtaaatcagtgcgatgagtaggggaagggagcctactagggtgtagaataggaagtatgtgcctgcgttcaggcgttctggctggttgcctcatcgggtgatgatagccaaggtggggataagtgtggtttcnaagaagatataaaatatgattagttctgtggctgtgaatgctataatta

SEQ ID NO: 3079 - DNA, 294 bp, Homo sapiens
gcgcattgagccagtggtgctaaatgctacatactccaactgaaatgttaaggaagaagatagatccaattaaaaaaaattaaaaccaatttaaaaaaaaaagaacacaggagattccagtctacttgagttagcataatacagaagtcccctctactttaacttttacaaaaaagtaacctgaactaatctgatgttagccaatgtatttatttctgtggttctgtttccttgttccaatttgacaaaacccactgttcttgtattgtattgcccagggggagctatcactgt

SEQ ID NO: 3080 - DNA, 266 bp, Homo sapiens
  misc_feature 204, 205: n = A,T,C or G
acccttccgcttacctatgcccatgtgcctgcccttccggcgggccaaggtgtttttccggcatcgagcccgggaatggaccgtcacaggcttgcggatgatcagcccatctttgatgagcttccggatctgctgacgggagttggcattggcgatttcattggtctcattggggtctaaccagaccttcttcttgccacagcnnaggacactagaggcgagcctcttctgaagcctgagcatactcatggctgcggccgcagcag

SEQ ID NO: 3081 - DNA, 432 bp, Homo sapiens
acaggtagatttttccgtccctcattaatagtgccttcttaattaatacagactggtgttagctataacaaaactccagtaaggccaaagaatcccaagttctttgtgaaaaaaaaaaaaaatcttttagggtcagattttcccttctaatatcattgaagatgatgttgcattgatttattcataaagtattttaactataggaactctagaagataatggttaggcaagtgatttttttttaaatatggttggcgtaagttgtattttgaaattcacttattttaaaatcgaagaggattgtaatcatggaaatagaatgtttgtatctacctgcccacattttcttaaaaagatatttcatatacagataatgaagaccaagctagtggctgcactgtaggtctgctgcttatttgtatttgttttgct

SEQ ID NO: 3082 - DNA, 484 bp, Homo sapiens
ggagagccagtcagtgagtggctgttacggggccggctacagtgggcagaacagcatgggtggctatgactagttttgttaggaacatttgagttacttcaatcattttcacaggcagccaacaagcaattaagagcagttataatagaggaagctgggggacccattttgcaccatgagtttgtgaaaaatctggattaaaaaattacctcttcagtgttttctcatgcaaaattttcttctagcatgtgataatgagtaaactaaaactattttcagcttttctcaattaacattttggtagtatacttcagagtgatgttatctaagtttaagtagtttaagtatgttaaatgtggatcttttacaccacatcacagtgaacacactggggagatgtgcttttttggaaaactcaaaggtactagctccctgattcaaagaaatatttctcatgtttgttcattctagtttatattttcat

SEQ ID NO: 3083 - DNA, 355 bp, Homo sapiens
ctgaaatccgccgggaagcctgggtctcctctagcttatttggtgtctccagagctgtccaggaatttggtcttgcccgattcaaaagcaacgtgaccaagactatgaagggttttgaatatatcttggctaagctgcaaggcgaggccccttccaaaacacttgttgagacagccaaggaagccaaggagaaggcaaaggagacggcactggcagctacagagaaggccaaggacctcgccagcaaggcggccaccaagaagcagcagcagcagcaacagtttgtgtagccagtctaccaccaccacagcaccccagacagctaggcttagcccctctgccctcccttcattgt

SEQ ID NO: 3084 - DNA, 442 bp, Homo sapiens
gttaaatttggccttaatttaatatacttgttagcaagcgtgtgtgacagagagtggggaaagctacatcattgaatattttgataaactttaccgacttgagtttggtttatttttcccttttcctaaattaactagcactgactgtaatttatttccctgtttcacgtctctcccttccattctgcaggagttttagctatttgagatcgtggaccatcagttttgcactttagagagtgtttctgactctaaacctgttttatcagaaaatttgttttttcttgatcttagctggaaaaatctgccaactttacacagtatttacttggttttgacccacagaatatagcacgttgtgcaaactgtcgattcagcgaaacttaaaaaagacaagaaactactgaggagcttagtaactgctgtttctgtttttgtacaa

SEQ ID NO: 3085 - DNA, 51 bp, Homo sapiens
acactttttgttacagttacatatatgaatagttagcagaggagaaactcc

SEQ ID NO: 3086 - DNA, 313 bp, Homo sapiens
  misc_feature 236, 300: n = A,T,C or G
acttgttcttgcggatcatgtgtctgatgctgctgagcgtggcgcgagcattcttgttgatggtggtccgcacataggaggtggcaggcttccgctggccggatctccgcttaatgaccaccacgacacctttgccgtcggctgccggctccacgcccacagtcttgcggtgaatcagtccgttgtagcggaaggaattgcgggccttcaagttattgggctcagtgctgtaggtntgcttattcctcttgatcaggaaactggagcagttccgcacgaccatccattgcagatgcgcanacatggcggcggc

SEQ ID NO: 3087 - DNA, 463 bp, Homo sapiens
  misc_feature 346, 372, 437, 446, 454: n = A,T,C or G
acaaccttatttattaaacttgaggtgggcaggggagagggaggaaagcacattcgggaacgagttctcaaactaatgctcagaaccggtgtccagtgacgtagaaaccactttcccaaatggcggagccttttcttccctggggatagtggcagagggagtgaccgccaccgcaacatgcctgctgactccctctcagtcccactttccatttctattcttttttatcagatggcattcttggaatcaggaattatcactatcacctataagttatttatcaagttgatagttaaatcattaaagaaaaggagtatcaggggtagctgctcacattgtggggcangaagataggatttgagggctgcaaanaaaaaccaaggaaggtatcacactcctgtccccaaataattttttcataagttaatcatgacttnttaagggcnaaactatnatggatagc

SEQ ID NO: 3088 - DNA, 362 bp, Homo sapiens
accgttgcccatgcggggattaatgtgcagagctatgtcccctgaggagcccaccttgaagttgatagcaaagctcttgcctgtgggaggcacatagcccttgatgatgatggttcttcgagctgtgagccctccttgcagcctcccgaaatatggcacaggcgggttgaaggttgggggtccttccatggtgggcaggctgttcagctgttgatggcaatgtccgggaccagggtaaggtggcatcatcgggggtccctggggccggaggggctggcctccgatgaagttgattgattgaagttgcagatccccatccacttgcaggtgggtgaccatctgtaggggaagccggtgcccgt

SEQ ID NO: 3089 - DNA, 305 bp, Homo sapiens
acctgggaaaaggctgtttgtgtcaccaggtggggagaaattcaccttatggtagaattgctctctttggttcattatttctgtgaactcctcaggagacacacactttcgggaggctaggcgttttggcaggtctgatgtgctggacaccaacttgtccaggggagagcctggagcagcatcctgggatactcgaaatgaaaagaaacttgctgctaaaccagagccataagagaaggcaccaatcctggagccagccagttcttgggcagagtggtgggacagaagcgaggccaggcacccgt

SEQ ID NO: 3090 - DNA, 249 bp, Homo sapiens
acccaacttgggagcttttatttacagaaaggcctgggtggatcggggagaaaggggtggggagttatgcgagaaagagaagggagatgatgtttaaatactgagctgggaggcagggaaggaagtagtggggctggcttaagggtatagccgcctcaggggagtcacccagcagcagtcacctggtaggtccagagagtgagatgggatcaggaactggcatagacctcagtcattggtcctcaagct

SEQ ID NO: 3091 - DNA, 301 bp, Homo sapiens
atggaacctggctaactgcaagctgaagaccaaccacattggccacacaggctatctgaacacggtgactgtctctccagatggatccctctgtgcttctggaggcaaggatggccaggccatgttatgggatctcaacgaaggcaaacacctttacacgctagatggtggggacatcatcaacgccctgtgcttcagccctaaccgctactggctgtgtgctgccacaggccccagcatcaagatctgggatttagagggaaagatcattgtagatgaactgaagcaagaagttatcagt

SEQ ID NO: 3092 - DNA, 53 bp, Homo sapiens
  misc_feature 33: n = A,T,C or G
gacatttttttcttttgttacgttattatcatntctttgtgctttattatcct

SEQ ID NO: 3093 - DNA, 439 bp, Homo sapiens
  misc_feature 387, 388: n = A,T,C or G
acttgaccccacagccatctgggatgagccgcttttcagccaccatgtcttcaaattcatcagcattgaacttggtgaagccccacttctttgagatgtggatctaaggagcaatggaaagaactgagtcaggaggcctggggcaaaggtgggagaagggggctgcagcactacataccttctggcggccaggaaacttgaacttggccctgcgcagggcctcaatcacatgctccttgttctgcagcttggtgcggatggacatgataacttggccaatgtgaaccctggccacagtgccctggggctttccaaaggcacctcgcatgcctgtttggagcctacattggggtagtgcaaggtcagaaacatgaacatccacctgannggcctgtctccaaggtcccttagagcaacccatacaaccaacaggctgcgt

SEQ ID NO: 3094 - DNA, 373 bp, Homo sapiens
gaacaactggatctggatcctggtcaaactttaatttattatgttgatgaaaaagcacctgaattctcaatgcagggtctaaaagctggtgttattgctgttattgtggttgtggtgatagcagttgttgctggaattgttgtgctggttatttccagaaagaagagaatggcaaagtatgagaaggctgagataaaggagatgggtgagatgcatagggaactcaatgcataactatataatttgaagattatagaagaagggaaatagcaaatggacacaaattacaaatgtgtgtgcgtgggacgaagacatctttgaaggtcatgagtttgttagtttaacatcatatatttgtaatagtgaaacctgt

SEQ ID NO: 3095 - DNA, 304 bp, Homo sapiens
ctgtggtccaaggccatttttgctggctataagcggagtctccggaaccaaagggagcacacagctcttcttaaaattgaaggtgtttacgcccgagatgaaacagaattctatttgggcaagagatgcgcttatgtatataaagcaaagaacaacacagtcactcctggcggcaaaccaaacaaaaccagagtcatctggggaaaagtaactcgggcccatggaaacagtggcatggttcgtgccaaattccgaagcaatcttcctgctaaggccattggacacagaatccgagtgatgctgt

SEQ ID NO: 3096 - DNA, 336 bp, Homo sapiens
accacttgcagtcaaatgaattccttcgaaatgtatttgaacttggacccccagtgatgcttgatgctgcaacgcttaaaacgatgaagatttctcgtttcgaaaggcatttatataactctgcagccttcaaagctcgaaccaaagctagaagcaaatgtcgagataagagagcagatgttggagaattcttctagattttcagaacttgaagactattttctaatttctatttttttttctatttcaatgtatttaaactctagacacagtttttatcttggattaacttagataacttttgtagcagtggttatattgcttataatttaatgt

SEQ ID NO: 3097 - DNA, 487 bp, Homo sapiens
actccgtgtggatcggcggctccatcctggcctcgctgtccaccttccagcagatgtggatcagcaagcaggagtatgacgagtccggcccctccatcgtccaccgcaaatgcttctaggcggactatgacttagttgcgttacaccctttcttgacaaaacctaacttgcgcagaaaacaagatgagattggcatggctttatttgttttttttgttttgttttggtttttttttttttggcttgactcaggatttaaaaactggaacggtgaaggtgacagcagtcggttggagcgagcatcccccaaagttcacaatgtggccgaggactttgattgcacattgttgtttttttaatagtcattccaaatatgagatgcgttgttacaggaagtcccttgccatcctaaaagccaccccacttctctctaaggagaatggcccagtcctctcccaagtccacacaggggaggtgatagcattgc

SEQ ID NO: 3098 - DNA, 239 bp, Homo sapiens
ctccatgctgcaatcactgtcctgggcttatggtgctatggactaggggtcctttgtgaaagagcaagatggagcaatggagagaagacctcttcctgaatcactggactccagaaatgtgcatgcagatcagctgttgccttcaagatccagataaactttcctgtcatgtgttagaactttattattattaatattgttaaacttctgtgctgttcctgtgaatctccaaattttgt

SEQ ID NO: 3099 - DNA, 279 bp, Homo sapiens
gaagaaataagcccatgcaagtggaagggctgctttgtcaggaggttgtggaatttctttcttctccccttcttccctcccaaaagcttagctatgtataaagtgccacagataggaaacagctgttaattacaaagagaaagaattgtcatagcatcttattttgttcctagttttataacattaccatccttcgttttgaactacagatgttgcagtgggttttggaggagggagtggagtaagatgccctcccacttttatcagtttagtagtagt

SEQ ID NO: 3100 - DNA, 507 bp, Homo sapiens
  misc_feature 451: n = A,T,C or G
actccttgactgcaggaggctggaagacatcctagtagctccactcagaacatttacttcaagaagcctttttccagtttccaactcatgaataaagataatattttgttaattctattccagaaaacttttttgcaagttgttttatttacaatgccaacttttaaaaggtcactaaagttaactggacaataaactaggcagacattgctttacaaaaaagagggaaagcccaaaatgccacttatagagaacccacagttcagttttattcagagcaaagaaaaaagaaactttccatcatactagaagaaacttggccgtaaggtttgggatctgtgctcaaactacacatgcaatgaggacaatattctgctaatacaattgacttgctgctgcatttgtctactgtttgtctaatattaacaattataaacagagcagtgcaacnagtatttggaacaatccttacagtgttacagtgtcaggcacaacatttcacttctc

SEQ ID NO: 3101 - DNA, 499 bp, Homo sapiens
agaacatccaaagtgtgaatgtaaggtcccccggaccccactgcgcccaaaccgaagtcatagccacactcaagaatgggaagaaagcttgtctcaaccccgcatcccccatggttcagaaaatcatcgaaaagatactgaacaaggggagcaccaactgacgggagagaagtaagaagcttatcagcgtatcattgacacttcctgcagggtggtccctgcccttaccagagctgaaaatgaaaaagagaacagcagctttctagggacagctggaaaggacttaatgtgtttgactatttcttacgagggttctacttatttatgtatttatttttgaaagcttgtattttaatattttacatgctgttatttaaagatgtgagtgtgtttcatcaaacatagctcagtcctgattatttaattggaatatgatgggttttaaatgtgtcattaaactaatatttagtgggagaccataatgtgtcagccaccttga

SEQ ID NO: 3102 - DNA, 440 bp, Homo sapiens
  misc_feature 393, 438: n = A,T,C or G
actctgaggcttgtaggagggtaaaatagagacccagtaaaattgtaataagcagtgcttgaattatttggtttcggttgttttctattagactatggtgagctcaggtgattgatactcctgatgcgagtaatacggatgtgtttaggagtgggacttctaggggatttagcggggtgatgcctgttgggggccagtgccctcctaattggggggtaggggctaggctggagtggtaaaaggctcagaaaaatcctgcgaagaaaaaaacttctgaggtaataaataggattatcccgtatcgaaggcctttttggacaggtggtgtgtggtggccttggtatgtgctttctcgtgttacatcgcgccatcattggtatatggttagtgtgntggttagtaggcctagtatgaggagcgttatggagtggaagtganat

SEQ ID NO: 3103 - DNA, 243 bp, Homo sapiens
  misc_feature 168, 216, 224: n = A,T,C or G
acatcatggctcggacttgggtcaagctcttggcaccaatgtcctggcatgagtgttggatgccagcaatcaggtaagggacaaatttgtggattgaccctttgtcctgcacagcaccagacactccctgggccactttgattttgtcagcttcactgaaatatctgntctggctgctgaggtgcttgtccatggcatcgagagaacccataccgngatatttntttagccggatcccatcgg

SEQ ID NO: 3104 - DNA, 243 bp, Homo sapiens
  misc_feature 18, 75, 76, 178: n = A,T,C or G
cgcaaatgtctccgagcntactcacatagcatattggtatatcaaaatgaaatgcaaggaaccaaaaataatatnnttgaaggcagtaaaagtgaaattaaataggaagatcatcagtcaaggaagacccactggagaggacagaaaatgaagcagtgttttatcatgtgtatttcancaggtcttcttgaaatttaactaaaaatatgactgctctctcttcagagaactgctcttttcagt

SEQ ID NO: 3105 - DNA, 229 bp, Homo sapiens
  misc_feature 143, 179, 193: n = A,T,C or G
acatttggtaaggatgactcaaacacagagcctggcacagagtaagtgctcaacaaacatttactgcccaaatgaattataaactaggaaacatatttaagatgtgaagtgtcttgtcacttctggagcttatagccaagtantggatgacaagggttcaggacggtaatgggtatttncccaaggaagatcnggatgactgaactgatatctgaagaaagaacaaaag

SEQ ID NO: 3106 - DNA, 309 bp, Homo sapiens
aacaaactgggggaattccttgcttatccttatgttgatcctggaacctttaattaagaatagctacactcacaaaaataccccctcatgaaataactgttctcttggatggttaccttatttctaagaaacgccactgaggaacaggatccactttgaacagtccgctaaagctatcaaaaaaaagtccaaatcacagattttcttataatgatagtatttaaatgtttataacatagtttaattttatatttattccagatagtatttaatttagtgctttttacccattttgagttgagttgtagt

SEQ ID NO: 3107 - DNA, 285 bp, Homo sapiens
  misc_feature 122, 172, 173, 174, 251: n = A,T,C or G
atcgatcttgatgctgtggaagtagtttgaggaacatcctatgagttttcttagaatgtataaaggttgtagcccatccaacttcaaagaaaaaaatgaccacatactttgcaatcaggctntaatgtggcatgcttttctaattccaactttataaactagtaaaaaagtnnntgcttattccaccagttctactgtgacatactcgagtataaagacatgtagcaataacggggagtggggggggagtntcacagtgcctttggaagggcccgaacttgcctt

SEQ ID NO: 3108 - DNA, 358 bp, Homo sapiens
  misc_feature 307: n = A,T,C or G
gtgaatggtctctctttggctggaattacaaaactcagagaaatgtgtcatcaggagaacatcataacccatgaaggataaaagccccaaatggtggtaactgataatagcactaatgctttaagatttggtcacactctcacctaggtgagcgcattgagccagtggtgctaaatgctacatactccaactgaaatgttaaggaagaagatagatccaattaaaaaaaattaaaaccaatttaaaaaaaaaaaagaacacaggagattccagtctacttgagttagcataatacagaagtcccctntactttaacttttacaaaaaagtaacctgaactaatctgatgttaaccaat

SEQ ID NO: 3109 - DNA, 143 bp, Homo sapiens
acaaccctgacacccatcaccaccaccactacggtgaccccaaccccaacacccactggcacacaggccccaaccccaacagccatcaccaccaccaccacggtgaccccaaccccaacacccaccggcacacagaccccaac

SEQ ID NO: 3110 - DNA, 386 bp, Homo sapiens
ggaaatgatccgggacctgtgccaggcagacaagacttggaacgcagtgctgctgcgctatttcaaccccacaggtgcccatgcctctggctgcattggtgaggatccccagggcatacccaacaacctcatgccttatgtctcccaggtggcgatcgggcgacgggaggccctgaatgtctttggcaatgactatgacacagaggatggcacaggtgtccgggattacatccatgtcgtggatctggccaagggccacattgcagccttaaggaagctgaaagaacagtgtggctgccggatctacaacctgggcacgggcacaggctattcagtgctgcagatggtccaggctatggagaaggcctctgggaagaagatcccgt

SEQ ID NO: 3111 - DNA, 433 bp, Homo sapiens
atcgatcttgatgctgtggaagtagtttgaggaacatcctatgagttttcttagaatgtataaaggttgtagcccatccaacttcaaagaaaaaaatgaccacatactttgcaatcaggttgaaatgtggcatgcttttctaattccaactttataaactagtaaaaaagtgtttgcttattccaccagttctactgtgacatactcgagtataaagacatgtagcaataacggggagtgggggggagtctcacagtgcctttggaagggcccgaacttgccttaaatcttcctcaaccaaataagtattttattagtgcttgagagaatctgaatgtaggatgggttcaactgcacaaaaggaaaagatttttaccactttttttatatagatataaagtgaagcaaccgccttagtgctgaaatatgtagt

SEQ ID NO: 3112 - DNA, 321 bp, Homo sapiens
accctcgtgggggcggaaatattgccgcgtccctgagtcctctgggcagatgcagagccgcgtaagcctcatagaagcaaagccaggggaacagtgggagctctggcctcgcggtgcggacgttagtaatggattcctggggaacagcgacctctggaggagcctctcatccacacagagtcaggaactaaaggactggttctgagacaaagcaccctttcctcaccctactcccattccacccgcttggaaaagttatccagagacttttaacctccggactccactcttcgcttatgcttgcttttttttccaacctgt

SEQ ID NO: 3113 - DNA, 178 bp, Homo sapiens
  misc_feature 161: n = A,T,C or G
gtaaaagacgtgaaccagcaggagttcgtcagagctctggcagccttcctcaaaaagtccgggaagctgaaagtccccgaatgggtggataccgtcaagctggccaagcacaaagagcttgctccctacgatgagaactggttctacacgcgagctacttncacagcgcggcacctgt

SEQ ID NO: 3114 - DNA, 481 bp, Homo sapiens
  misc_feature 428: n = A,T,C or G
cagaggcggaagctgcagccctagaggtcctggctgaggtggcaggcatcttggaacctgtaggcctgcaggaggaggcagaactgccagccaagatcctggttgagtttgtggtggactctcagaagaaagacaagctgctctgcagccagcttcaggtagcggatttcctgcagaacatcctggctcaggaggacactgctaagggtctcgaccccttggcttctgaagacacgagccgacagaaggcaattgcagctaaggaacaatggaaagagctgaaggccacctacagggagcacgtagaggccatcaaaattggcctcaccaaggccctgactcagatggaggaagcccagaggaaacggacacaactccgggaagcctttgagcagctccaggccaagaaacaaatggccatggagaangcagagcagtccagaaccagtggcagctacaacaggagaagcatctgcagcat

SEQ ID NO: 3115 - DNA, 525 bp, Homo sapiens
acctgctacttttatgcttgtgtctttagatgaaggtccaggtcctccaatcaaataccagtatgctgaattaggcaaattatactcagtagtgtcacagctgatccgctgttgcaatgtctcttcaagaatgcagtcttcaatcaatggtaatcctcctcttcccaatccttttggtgatcctaatttatcacaacctataatgccaattcagcagaatgtggcagacattttatttgtgagaacaagttatgtgaagaaaatcattgaagactgcagtaattcagaggaaaccgtcaaattgcttcgtttttgctgctgggagaatcctcagttctcatctactgtcctcagtgaacttctctggcaggttgcatattcctatacctatgaactgcggccctatttggatctgcttttgcaaatcttactgattgaggactcctggcaaactcacagaattcataatgcactgaaaggaattccagatgaccgagatgggctgtttgacacaatccaacgctc

SEQ ID NO: 3116 - DNA, 423 bp, Homo sapiens
acctggagaagatcaaacagcgactgtttgagaaccttagaatgctgccgcacgcacctggggtccaaatgcaggcgattcctgaggacgccatccctgaggagagtggcgatgaggacgaagacgaccctgacaagcgcatctcgatctgctcctctgacaaacgaattgcctgtgaggaagagttctccgattctgaagaggagggagaggggggccgcaagaactcttccaacttcaaaaaagccaagagagtcaaaacagaggatgaaaaagagaaagacccagaggagaagaaagaagtcaccgaagaggagaaaaccaaggaggagaagccagaagccaaaggggtcaaggaggaggtcaagttggcctgaatggacctctccagctctggcttcctgctgagtccctcacgtttct

SEQ ID NO: 3117 - DNA, 498 bp, Homo sapiens
  misc_feature 448: n = A,T,C or G
acacaaaatgcatctttcctgtaaactggtgtgtgttcagcacactccacacatggcaatatgttagaatctagccatcacatttgatagagttttgatagaaatgcatccaatgggaacaaacaccccatatgttgtagtgtctaaatagaaactcagtgtaaaaaagtaaaaaacaaaaatagacaggaagggagggagttatccttgaatagtgatggaccatggactataacgtgattgtgttcattcttaaagcactacccagagaccaatggtgccgttgccttggtgcccgcctgagtcactacgttgccactggcgttgctcctggatttggaaagtccttgtagacccagaaactaccaaaaatctgtgatcctttccactttgagtatcccgatgctcaagcagttttcaacatcagctatcaatgttgtgatgggcntgtcataacaggattgtgaataccatatacatgatctttatgataaccat

SEQ ID NO: 3118 - DNA, 493 bp, Homo sapiens
accaggatgcagaactcacccaggatgcatctaatgtgagtagctcgattccttgctgtaacataggcttaaagcggagggtcagtggaaatgggaccttggttgtgacaaagcctgagaatgtcatgttgatccatccaccaataagaatcatagggaggacatttgttacattccctttcatcatgtctgtcaacatagtaggatcagtcataggagaaggtggcactaccttccgtttagtttttttgaaaaatccatcctctgggttgttgaaataatattttcgtgtcaagaaagactgtttgggaatgtattttccattttccctgaggactctgcttcgaattaggacttgactgtcagatacttgttcctgggtgagcttcttgtcgctctgcagcaggatggacacgtagtggcggatcatgcctacgaagaaagtgatgataacgatgggtaggaccacccagaggcggatgttggagtcgag

SEQ ID NO: 3119 - DNA, 113 bp, Homo sapiens
  misc_feature 62, 111: n = A,T,C or G
acacaaaaccttttcacatattgggggcttaccgctccaaattgctactgatcctttaagtncacaatatagaatttcttcaccaattaagtaataaccctcattacaaanaa

SEQ ID NO: 3120 - DNA, 441 bp, Homo sapiens
acatataaatgaatctggtgttggggaaaccttcatctgaaacccacagatgtctctggggcagatccccactgtcctaccagttgccctagcccagactctgagctgctcaccggagtcattgggaaggaaaagtggagaaatggcaagtctagagtctcagaaactcccctgggggtttcacctgggccctggaggaattcagctcagcttcttcctaggtccaagccccccacaccttttccccaaccacagagaacaagagtttgttctgttctgggggacagagaaggcgcttcccaacttcatactggcaggagggtgaggaggttcactgagctccccagatctcccactgcggggagacagaagcctggactctgccccacgctgtggccctggagggtcccggtttgtcagttcttggtgctctgtgttccc

SEQ ID NO: 3121 - DNA, 316 bp, Homo sapiens
  misc_feature 116, 137, 187, 247, 268: n = A,T,C or G
acaagctttttttttttttttttttttttttttgcgcttaattcactttatttttcttgtataaaaaccctatgttgtagccacagctggagcctgagtccgctgcacggggactntggtgtgggtcttgacgaggnggtcagtgaactcctgatagggagacttggtgaatacagtctccttccanaggtcgggggtcaggtagctgtaggtcttaaaaatggcatcaaaggtggccttggcgaanttgcccagggtggcagtgcanccccgggctgaggtgtagcagtcatcgataccagccatcatgagcagc

SEQ ID NO: 3122 - DNA, 183 bp, Homo sapiens
acttcctatgccagcctcaattttatttgatttttaaaattattctcttctaaccaatgaagtgtttgtcagtatgccccaaagcttgctcttttgtgctcccttttgaataactttctatccagaaaaagagattatttgggacttgagatttgcagtgataccaacttatagcaatgatgt

SEQ ID NO: 3123 - DNA, 347 bp, Homo sapiens
accttattatcctacatcgcaaatttcaacagctacattatatttccttctgacacttggaaggtattgaaatttctagaaatgtatccttctcacaaagtagagaccaagagaaaaactcattgattgggtttctacttctttcaaggactcaggaaatttcactttgaactgaggccaagtgaactgttaagataacccacacttaaactaaaggctaagaatataggcttgatgggaaattgaaggtaggctgagtattgggaatccaaattgaattttgattctccttggcagtgaactactttgaagaagtggtcaatgggttgttgctgccatgagcatgt

SEQ ID NO: 3124 - DNA, 140 bp, Homo sapiens
acagtttgttttatatctctttactttttttgttactattttatctggccagcgtaatagttttatttagattttttaaaattctgtagattaaagcaaatgacagttattgaactatcacaaaactattaaactgtggt

SEQ ID NO: 3125 - DNA, 316 bp, Homo sapiens
gaaaaagggccgttctgccatcaacgaagtggtaacccgagaatacaccatcaacattcacaagcgcatccatggagtgggcttcaagaagcgtgcacctcgggcactcaaagagattcggaaatttgccatgaaggagatgggaactccagatgtgcgcattgacaccaggctcaacaaagctgtctgggccaaaggaataaggaatgtgccataccgaatccgtgtgcggctgtccagaaaacgtaatgaggatgaagattcaccaaataagctatatactttggttacctatgtacctcggccggaccacgct

SEQ ID NO: 3126 - DNA, 386 bp, Homo sapiens
acatgttgtttgttatgattttattcacgctaaaggaatgggtattaaaattaagtgcatataatatagaattcagtttcaagtctgaagttagcgtaaatttagattcttcagactaacataaaacatgattttgagaagttaaataggaagatgccttttttagaagtttagcatatttagtttatctcccaaatcttgcttagaaatcaaatgtatataagagaagttagttacagagctagattgattaactacttctttaatgaagatttgctatgaatttgtttactctttcataccaccttcagatagctagtcagttcagcaggagcagagaccaggttagcacgcggatggggtgtaattcagtgtttttgtgttgt

SEQ ID NO: 3127 - DNA, 253 bp, Homo sapiens
  misc_feature 161: n = A,T,C or G
actattgacccagcgatgggggcttcgacatgggctttagggagtcataagtggagtccgtaaagaggtatctttactataaaagctattgtgtaagctagtcatattaagttgttggctcaggagtttgatagttcttgggcagtgagagtgagtagtanaatgtttagtgagcctagggtgttgtgagtgtaaatcagtgcgatgagtaggggaagggagcctactagggtgtagaataggaagtatgtgc

SEQ ID NO: 3128 - DNA, 291 bp, Homo sapiens
acggccagggctattggttgaatgagtaggctgatggtttcgataataactagtatggggataaggggtgtaggtgtgccttgtggtaagaagtgggctagggcatttttaatcttagagcgaaagcctataatcactgcgcccgctcataaggggatggtcatggctaggtttatagatagttgggtggttggtgtaaatgagtgaggcaggagtccgaggaggttagttgtggcaataaaaatgattaaggatactagtataagagatcaggttcgtcctttagtgttg

SEQ ID NO: 3129 - DNA, 446 bp, Homo sapiens
cagaagcactgattatgggatatttcagatcaatagccgctactggtgtaatgatggcaaaaccccaggagcagttaatgcctgtcatttatcctgcagtgctttgctgcaagataacatcgctgatgctgtagcttgtgcaaagagggttgtccgtgatccacaaggcattagagcatgggtggcatggagaaatcgttgtcaaaacagagatgtccgtcagtatgttcaaggttgtggagtgtaactccagaattttccttcttcagctcattttgtctctctcacattaagggagtaggaattaagtgaaaggtcacactaccattatttccccttcaaacaaataatatttttacagaagcaggagcaaaatatggcctttcttctaagagatataatgttcactaatgtggttattttatattaagcctacaacatttttc

SEQ ID NO: 3130 - DNA, 334 bp, Homo sapiens
  misc_feature 217, 277, 297, 323: n = A,T,C or G
acatggccaccaagtaagaatggttggtgacaagacagaaggctaaaacaggaaggtaatcttgtgcacctgacaaatagaaagaataaaggatcaaaattgaaggcaggctataagagtatcaagaaattcttaaaaaccaaaaagtgatttggaagcacaaaacttacagttaatgctacccaatgtcatgatgggccaagaacattgtggcttnctaagttagaaaatgccatatgccaaaattttaaatggaacacactacatttttttctantcaatccccccctctcccanaaaaaataggaactcatttttttcanggtggggagga

SEQ ID NO: 3131 - DNA, 528 bp, Homo sapiens
aagcttgcggccgcaaaccttttttttttttttttttgctttcaagtttattaaagaagatcactaaagatattgactagagaatgctgtgtgctatttcaattacatttgtttttcttttattaacaggaattttgattcttcaaggaagtggctcaatttcaatttcaggtgaccaggtttatcgtgacttttccttcttgtttacttttcgctaggaaggggagttgtaggggcagattcaggtattggaataggaaaattacgtctaaaccatggaaatcttggaaatggaattggtggaagtgggcgaaatggatatgggtaagggaacacaaaaaaccctgaagctaattcatcgctgtcactgatacttcttttttctcgttcctggtcttgagagactgggaaaccaacagccactgccaagatggctgtgatcaggaggagaactttcttcatctcaaacgtttcagtcagttctttctctctgacgctgcctcgtgccgaattcttggcctcgagggc

SEQ ID NO: 3132 - DNA, 173 bp, Homo sapiens
acgactcacggacacagatgctaacttctcagctgggagatccactcggagaccattcacccacacacccttgtttggagtcaacgtcaccatcccatcctggaagaagatgtggacctggcccacagcctccgttttgccatggcagatctggacttcggcaactacacggt

SEQ ID NO: 3133 - DNA, 367 bp, Homo sapiens
  misc_feature 243, 254, 261, 266, 298, 303, 319, 321, 347, 350, 352: n = A,T,C or G
tttttttttttttttagggaattttctttattttttacaaattaagactatgcagatttcatatatttctgaatcaaaaacacctttgtcttcacagtatgagttagaatgcagcctgagctgaaaatcaagaaactagaaaagaaagtggtagagataactatattaaaaatctgttaggtattttctttaaaagtaggtgtttttttttttttctttctttttttttttttaatatcttgncattcttggcnctgtttntaaanaaaaactccattatcccaagcaaaaagcacanaaggnggagtttggcttcaananatgttaactcaaaatcttaggcctancananaatcaccaaatttat

SEQ ID NO: 3134 - DNA, 438 bp, Homo sapiens
acttcaaggtctggaacatgttgagctgagtccagtagacatacatgagtcccagcatagcagcatgtcccaggtgaaatataatcgtgctaggagcaaaagtgaagttggagacattggcaccaatccggatccacagagcgaagagcagaagcaacggcgagaggatcagggcagtgaatgtattggacaccacggtggggggcctcttctcaggctcgcggaacaggtgctgaatttcctgttttggagtgaaaaggttctgggacaagacagtcgagggagcttcttcttcagggaacttgatgaccacatcagccacattccagaggattgggttcttcaaagtggcatctccaatgattaagtagagagtgtaggtgccaaaggcagagtcaaattcaatctttctttcagaggtatccagttcaaacttgt

SEQ ID NO: 3135 - DNA, 260 bp, Homo sapiens
accacagtaggcttcggtatctccctagccaggtgagggacccccaggcattctccctgcccgcaccgagtctctcttcaccctggctacttcctggccacacgtatgactctgccccttactttctgctctgagctgcctgaatacaggaagcaagagttcactctgaccagagatccagaagcctgcaaggaggccccagcagctttcaagaatggggagcagatggccacatgtggcctgctctgtcttatagcgtc

SEQ ID NO: 3136 - DNA, 486 bp, Homo sapiens
actgcccgacttcctcatcttactgggtccagcataaagcagatgtccactgtcttcctcacatgctgtgatcttggcttagaggtaggcacagtgccgctccagcagcgaggggttcgcgttacttaggaacagcagctcttttttcccttcttctgtaggagctttctcatgttgaagccaattgttttccaaataatactgaatacaactttcaaattcctttgggttatagttggaaaccaggatgggaataaagggatccagggcatcaaatccttcctggggaagaaaaaggatcaggaaacatgttagttaaggaacaaagcaccagacagacagactctacttaagcactttgaaggtaaggatttgtttttcttctatgtaactctacttctcattctctggcaacattgcctgatacaggactccacatatggactccacatatggtggctggctactcgtgctctacgtggccac

SEQ ID NO: 3137 - DNA, 473 bp, Homo sapiens; identical to SEQ ID NO: 2542

SEQ ID NO: 3138 - DNA, 376 bp, Homo sapiens
cgatcccctcatcaaggtgaatgataccattcagattgatttggagactggcaagattactgatttcatcaagttcgacactggtaacctgtgtatggtgactggaggtgctaacctaggaagaattggtgtgatcaccaacagagagaggcaccctggatcttttgacgtggttcacgtgaaagatgccaatggcaacagctttgccactcgactttccaacatttttgttattggcaagggcaacaaaccatggatttctcttccccgaggaaagggtatccgcctcaccattgctgaagagagagacaaaagactggcggccaaacagagcagtgggtgaaatgggtccctgggtgacatgtcagatctttgt

SEQ ID NO: 3139 - DNA, 300 bp, Homo sapiens
actccttcttccccagagtgcagaagcgtatgaagacagttatgacatggacacatgcatgagctattatacataattacaaaagctgattctgtcatcaccacatcttgtctcatcagtaggagcgaatggctggcgggacggtggcacagtcagcctcgttcaaagttttgtcgatcacgggtctatattccagagtgaccttcccagtgccaacgtccacataggacagggtgtgcttcctccagtgctcctcaaagggcttcttctgttgcccctggatgggcttggagtaatcgt

SEQ ID NO: 3140 - DNA, 288 bp, Homo sapiens
accaactgcgggtcccttgggccgaaaatgccatgagggcggatggctgtggttaagaaattcttctcaggatcgttggcgcccagaactgccctctcctgtaagatcttagtctctgtgtagtagtcaatgggtttcatggcatagggaaggtcttcagttccattcttgatatcgacgccctcaaagatgacactggcactgctggttaaaatgagtttctgaaccccagcctctttgcaagtttcaatgacattcttggtgccaatgtaattcactctataaaag

SEQ ID NO: 3141 - DNA, 147 bp, Homo sapiens
accctgcttctgttggcttaatgcctcagaactttggtgtcattggtctcagacaccactttgccatccactatccggcgggtggtggtcttttggatggtttgcatggagttgctgctgtccaaggcatcaccaagattaaagtcc

SEQ ID NO: 3142 - DNA, 355 bp, Homo sapiens
  misc_feature 219, 234, 247, 309, 325, 347, 349: n = A,T,C or G
ggaatgtggaagaacttaagcggaaagctgcccaaaactccggggaggcagaatatattgaaaaagtagtatatactgtgaagcaaagtgcagaagatgttaagaagactttagatggtgaacttgatgaaaagtataaaaaagtagaaaatttaattgccaaaaaaactgaagagtcagctgatgccagaaggaaagccgaaatgctacaaaatgaancaaaaactcttttanctcaagcaaatancaagctgcaactgctcaaagatttagaaagaaaatatgaagacactcaaagatacttagaanataaagctcaagaatnagcaagactggaaggagaagtncnttcact

SEQ ID NO: 3143 - DNA, 398 bp, Homo sapiens
accgaatggaatggaatgtaatggaacggaatggaatggaacagaatggaatttaactgaatggaatggaatggaatggaatggagtggactcaaatggaatgaaaccgagtggaatggaatcaaatggaatggaattgaatggaaatgaaagtaatagaatggaatggagtgtaatggaataatatggaatggagtggaatggaatgcagtggacacaaatggaatggactggaatggaatggacacgaatggaatggactggagtggaatggacacgaatggaatggaatggaatgaaatggaatggaatggaatgaaatggaatggaaaggaatagaatggaatggaatcagttggagtagaatggaatggaatggagattaatggaattgaatg

SEQ ID NO: 3144 - DNA, 72 bp, Homo sapiens
  misc_feature 60, 66: n = A,T,C or G
gaaattaaaagactgcttcagggagacacacccgtgaggaagttgcaagccaacaaaaangttcanggatct

SEQ ID NO: 3145 - DNA, 276 bp, Homo sapiens
ctttatttgggtaaatggtttggctaaggttgtctggtagtaaggtggagtggttgttggtggaagggtggtagtgctggctggtggagtgatgggcgtagtcgttggagggctgggagtggtgatacacttatccatgggccagcaacaattgacacgtatcttgtagtcgtaacacagtccaaatggtccatttccaaactggtcttcattcttgcaaatgaacccaacagagacatcacactgcaccttctggcctagctgctccaagctgag

SEQ ID NO: 3146 - DNA, 367 bp, Homo sapiens; identical to SEQ ID NO: 2648

SEQ ID NO: 3147 - DNA, 517 bp, Homo sapiens
ccggccacagcctaacgctcttcgctgtcgtttgcggtctcgcgcagggcggccccggttctggtgtttggcgtcggaattaaacaaccaccatgtcgagcaaaaaggcaaagaccaagaccaccaagaagcgccctcagcgtgcaacatccaatgtgtttgccatgtttgaccagtcacagattcaggagttcaaagaggccttcaacatgattgatcagaacagagatggcttcatcgacaaggaagatttgcatgatatgcttgcttctctagggaagaatcccactgatgcataccttgatgccatgatgaatgaggccccagggcccatcaatttcaccatgttcctgaccatgtttggtgagaagttaaatggcacagatcctgaagatgtcatcagaaacgcctttgcttgctttgatgaagaagcaacaggcaccattcaggaagattacctaagagagctgctgacaaccatgggggatcggtttacagatgaggaagtggatgagct

SEQ ID NO: 3148 - DNA, 427 bp, Homo sapiens
actctgaggcttgtaggagggtaaaatagagacccagtaaaattgtaataagcagtgcttgaattatttggtttcggttgttttctattagactatggtgagctcaggtgattgatactcctgatgcgagtaatacggatgtgtttaggagtgggacttctaggggatttagcggggtgatgcctgttgggggccagtgccctcctaattggggggtaggggctaggctggagtggtaaaaggctcagaaaaatcctgcgaagaaaaaaacttctgaggtaataaataggattatcccgtatcgaaggcctttttggacaggtggtgtgtggtggccttggtatgtgctttctcgtgttacatcgcgccatcattggtatatggttagtgtgttggttagtaggcctagtatgaggagcgttatgga

SEQ ID NO: 3149 - DNA, 362 bp, Homo sapiens
  misc_feature 3, 331: n = A,T,C or G
atntacttcaggtaatcattgttttacttaaagttcagattccagcatatattgagatgaatattccctggttatactttgtcaatagttttctcattgctacagtgtattggtttaattgtcacaagcttaatttaaaagacattggattacctttggatccatttgtcaactggaagtgctgcttcattccacttacaattcctaatcttgagcaaattgaaaagcctatatcaataatgatttgttaatattattaattaaaagttacagctgtcataagatcataattttatgaacagaaagaactcaggacatattaaaaaataanctgaactaaaacaaaaaaaaaaaaaaaaaaa

SEQ ID NO: 3150 - DNA, 300 bp, Homo sapiens
acgattactccaagcccatccaggggcaacagaagaagccctttgaggagcactggaggaggcacaccctgtcctatgtggacgttggcactgggaaggtcactctggaatatagacccgtgatcgacaaaactttgaacgaggctgactgtgccaccgtcccgccagccattcgctcctactgatgagacaagatgtggtgatgacagaatcagcttttgtaattatgtataatagctcatgcatgtgtccatgtcataactgtcttcatacgcttctgcactctggggaagaaggagt

SEQ ID NO: 3151 - DNA, 491 bp, Homo sapiens
  misc_feature 34, 82, 177, 200, 291, 313, 366, 391, 392, 424, 449, 451,486: n = A,T,C or G
aagcttttttttttttttttttttttttttttgnttttataatatttattaagataacaaatttataaattgaaagactcanaggcacatagtttaaaaggccaataccatgggaataatgaagtcaacacagaaaagtaagaagatatgaacagttacaaccaatagaagattttntttaaaagccacattcccctggngaacacatcataggaatcatccttcaaaattaccatgataaaaagttatttccttcaaagaaaaataattctttctgcctaccgagcctanaaaatcctatttacaatgcagngtcctgcctttcatcagtattatttaatatggcctcctctattctgccattanaagtatggaaaattttatagctacnngtatttacaaatgcacataatatttaaatttngctcttcattgagaacaaccaaatntntacttaatcaaatcacaatacaaatgctttatagngttga

SEQ ID NO: 3152 - DNA, 296 bp, Homo sapiens
accattaggaaatggccccaggagtcagggtttccttctgagactctgagtcactgaagggatgtgttgaggtggaaggcgggaccccctccttcctcagacagacccaggcaaactaacaaacaaggcaaaatggaggcagccagtcctcctccttcatcttgactaacccaatggcagtggcccagggctttggggaatttcgatgggataggaaccaaagctactgccagaagcctgtttagttaggatgtccactgccccaggcaggtggtccccgggaccaaggctacagt

SEQ ID NO: 3153 - DNA, 384 bp, Homo sapiens
gctgtaggtctcttcttgcatgtccacagtaatgtatttgtggtttttattttgaacgcttgcttttagagagaaaacaatatagccccctacccttttcccaatcctttgccctcaaatcagtgacccaggggagggggggatttaaagggaaggagtgggcaaaacacataaaatgaatttattatatctaagctctgtagcaggattcatgtcgttctttgacagttctttctctttcctgtatatgcaataacaaggttttaaaaaaataataaagaagtgagactattagacaaagtatttatgtaattatttgataactcttgtaaataggtggaatatgaatgcttggaaaattaaactttaatttattgacattgt

SEQ ID NO: 3154 - DNA, 352 bp, Homo sapiens
  misc_feature 122, 196, 243, 261, 275, 289, 347: n = A,T,C or G
actacttttctcactttttctggttagccagaatgttccattaagaaacaataaaagttgtatagttctctaagatgaaagattagtatattcaatggctattatattaaccacttagtgancatacaacaaaaactatccttatattaattgactgaagttataacataagaaataagttacactactactttgncattcacttaatgcttacaagattactcaagaaatcaaaatggcttnccattgcttgacgtttgntgtccaaatacttnacatttcaatctcntatacctaacaaagaggaaaaaatccaaacatactttccttacctaaaaatattaaanaaggc

SEQ ID NO: 3155 - DNA, 449 bp, Homo sapiens
  misc_feature 400: n = A,T,C or G
acaggcccctccctgtctgtcccacagccagcgggaacgctggatggatgtgggcctgggtccctggagcccacgaggttcctgcagctttcctaagaggaaaaactgatccggtgatggaaggctgcggcctcctaaaagtctcccctgacgaggagacacggcaggggccacagtcacaaccagatcgagatgattagggaaggtgccgcggagtgcggtccactacacatcttcagggtgcatctggactctcttggggctgcaacagtatttttcacatagtttgaggagctctgacaaaatgaagacggatgagaccaatccagttaaaaacagcaaatcaagcgctcccaggttctccgtctggaagaccctctgcagcggggggatgtaaatnaccgccagctgccccaggatggaccccaggacggagtagaggaacatgt

SEQ ID NO: 3156 - DNA, 572 bp, Homo sapiens
  misc_feature 535, 566: n = A,T,C or G
acaatcttaccatccacctatcagattcgaattacaacttgtaaaactgaacttcagcaactcatccagcaaaagcgggagcagtgcaatgctgagagaatagctaagcagatgatggaaaatgctgaatgggagagtaaaccaccaccacctggatggcgtcctaaagggctgttagttgcccatcttcatgagcataaatctgctgtgaatcgaattagagtctctgatgaacactcactttttgcaacatgttcaaatgatggcacagtgaaaatctggaacagtcaaaagatggaggggaagaccaccactaccagatctattcttacatacagccgaattggaggacgagtcaagacgctcacattctgccaaggctcccactatttagccatagcatctgataatggtgctgtccagcttcttggaattgaggcttctaagctgcccaagtctcctaaaatccatcctctacaaagcagaattctagatcagaaggaggacggtcgtgttgtggatatgcatcacttcnactctggagcacagtctgttcttgcctatgncactgt

SEQ ID NO: 3157 - DNA, 351 bp, Homo sapiens
caaggattgcatggatagaagtgtctacccataatgactgggaacaggctgaattggacatgttcagcgttccttgtgggaacacatggtaacaaagtagctgagtgagtgattcagcagccaaggtaacctgtgcttcccctccccttataccttcaccatctgagcaagtgcattttcacactcaggtaagcagtagtggaacattatagactgctagggactctaaaagtggttgtggctatctacattaaccaacaagcagtttctcatgctagtgggttttttgtttgtttcgcttttttttttttttttgagatggagtttcactcttgtcgcccaggctggagt

SEQ ID NO: 3158 - DNA, 339 bp, Homo sapiens
cacctgggatccaccttcttccttaggtcccctcctccatcagcaaaggagcacttctctaatcatgccctcccgaagactggctgggagaaggtttaaaaacaaaaaatccaggagtaagagccttaggtcagtttgaaattggagacaaactgtctggcaaagggtgcgagagggagcttgtgctcaggagtccagccgtccagcctcggggtgtaggtttctgaggtgtgccattggggcctcagccttctctggtgacagaggctcagctgtggccaccaacacacaaccacacacacacaaccacacacacaaatgggggcaaccacatccagt

SEQ ID NO: 3159 - DNA, 494 bp, Homo sapiens
acatcgtattacacctgaggaggccaagtacaagttgtgcaaagtgagaaagatctttgtgggcacaaaaggaatccctcatctggtgactcatgatgcccgcaccatccgctaccccgatcccctcatcaaggtgaatgataccattcagattgatttagagactggcaagattactgatttcatcaagttcgacactggtaacctgtgtatggtgactggaggtgctaacctaggaagaattggtgtgatcaccaacagagagaggcaccctggatcttttgacgtggttcacgtgaaagatgccaatggcaacagctttgccactcgactttccaacatttttgttattggcaagggcaacaaaccatggatttctcttccccgaggaaagggtatccgcctcaccattgctgaagagagagacaaaagactggcggccaaacagagcagtgggtgaaatgggtccctggggtgacatgtcagatctttgt

SEQ ID NO: 3160 - DNA, 447 bp, Homo sapiens
accaaggagcagaaaggattacagggaagccagatgctgtgactctactgagttcctcaggatatgcgctgtctttccatacttcaactattgtgcccggcgcaagctttgctttatcatcaaaaacctcctgccagacaatggatcccttgtttatggttgcaataatatccaaaaccttttgaatgtagaaagattctagtttcttaaaatctgtgccaaagcctttttgcctcatgaaatcttgaatttttggatttgattcccaacatttaaattccacttcatctcctcccaaatgaatgaattgatctggaaacacctcactaatttctttgaaaaatgtagtaaggaagctgtatgttgtattcagagtagggtttataggtccaaaagagtccaacttgttttgtctactgtaacatggagtcaggaggtctttctgac

SEQ ID NO: 3161 - DNA, 303 bp, Homo sapiens; identical to SEQ ID NO: 2085

SEQ ID NO: 3162 - DNA, 464 bp, Homo sapiens
acagcaagattatttttgtggccaaatcaggtcataggattcctttttttttaaagataagtaaatgcatccagaaatgtatgcacagatttaagttttccccatagttttatctgctaggtgatagggtggagcttcttagtgcttctgctgggaattcagataggacagacttgcagcctcagaggacacactgcaggtagtgcagagagacatggaaggaaaacacactgcctgctacatagtttttatcccaggtataatttgtgaggaatgtataacaaatgtttcttaaagcatgaatcctcttcttgaattcttgtttttatgaaagccatccaactacttactcaatcctcttgaaatctgccttttgtaatgtaactgataggccagcgttttctttcactgtgggaaataaaggctacttggttgctttagggagggcaacaatgtcagctgca

SEQ ID NO: 3163 - DNA, 411 bp, Homo sapiens
actggggtcaagggaggcccccactcacagatactctcctttccttctggggctcaatgctcacagtattaacttagaaagacccttggcatgaagggagcctgttccaatatctcctcttggggtctgataattcaatgagagaaccagccaagagaataaattagggaacagtctccttggtctgtttaggacaacctttcacatcctaatcttttacttcccatgtttccctctcgtttgaaaatgaaatttaccttagctgactagcctgcttttgtgttctggttgcaaaaatattttgtgaatttatgataatcgatacttttgaattgtttttacctttcaaagtgtattccgttgaaaataccatggaacattaaggaaatggtggaggatggggtgaggagg

SEQ ID NO: 3164 - DNA, 436 bp, Homo sapiens
acgaagtatttaatagatctaatcaaatatgttgattcatggctataataaagcaggagcaattataaaatcttcaatcaattgaacttttacaaaaccacttgagaatttcatgagcactttaaaatctgaactttcaaagcttgctattaaatcatttagaatgtttacatttactaaggtgtgctgggtcatgtaaaatattagacactaatattttcatagaaattaggctggagaaagaaggaagaaatggttttcttaaatacctacaaaaaagttactgtgatatctatgagttatcatcttagctgtgttaaaaatgaatttttactatggcagatatggtatggatcgtaaaattttaagcactaaaaattttttcataacctttcataataaagtttaataataggtttattaactgaatttcatt

SEQ ID NO: 3165 - DNA, 539 bp, Homo sapiens
acgtgctcaggaaattaaaacaaaaatcaaggaattgaacaacacatgtgaacccgttgtaacacaaccgaaaccaaaaattgaatcacccaaactggaaagaactccaaatggcccaaatattgataaaaaggaagaagatttagaagacaaaaacaattttggtgctgaacctccacatcagaatggtgaatgttaccctaatgagaaaaattctgttaatatggacttggactagataaccttaaattggcctattccttcaattaataaaatatttttgccatagtatgtgactctacataacatactgaaactatttatattttcttttttaaggatatttagaaattttgtgtattatatggaaaaagaaaaaaagcttaagtctgtagtctttatgatcctaaaagggaaaattgccttggtaactttcagattcctgtggaattgtgaattcatactaagctttctgtgcagtctcaccatttgcatcactgaggatgaaactgacttttgtcttttggagaaaaaaactg

SEQ ID NO: 3166 - DNA, 432 bp, Homo sapiens
  misc_feature 375, 422, 424: n = A,T,C or G
acctgttgttatgtcagaattaagtgatcaaatgattttcatggagaggataaaaaatatgatatatatgctttattttgacttttggtttcaagcatatgatctgaagaagtgggaccagttttatagtgaagttctaggaagacccactacattatttgagacaatgccgaaagctgaaatgtggctcattcgaacctattgggattttgaatttcctcgcccattcttaccaaatgttgattttgttggaggacttcactgtaaaccagccaaacccttgcctaaggaaatggaagagtttgtgcagagttctggagaaatggtattgtggtgttttctctggggtcgatgatcagtaacatgtcagaaganagtgccaacatgattgcatcagcccttgcccagatcccacaaaaggntntatggaga

SEQ ID NO: 3167 - DNA, 428 bp, Homo sapiens
  misc_feature 71, 100, 106, 120, 125, 131, 144, 166, 230, 251, 253, 261,276, 282, 284, 289, 300, 308, 362, 365, 367, 383, 386, 400,418: n = A,T,C or G
acaagcttttttttttttttttttttttttttttttttatttttttttttttttttttttatatataaaanctttattacaggcagtattggtccatacnctaacncaataccaacagtncaggnttaatntttcaaaatcatnatttaaacagcaaaagaccaanaaataaaatttgagtcaattatttttcaaaaaattctcaatggaaattatccttaattcccttnttatagggaaacatacaaatncngaaaaatnccccatttaacaaanactagngntaaangggtatttggnttaaaatntgagttaaaaaaatcctttttagcaacctacatacagataagtagcaaactttnttntnttaaacaaattcattntgntaaaacatgtaaanaatttcatccatcatgtnttctgatccc

SEQ ID NO: 3168 - DNA, 527 bp, Homo sapiens
acaagtaaagtaaacttaggtttgttttctctcccatggctggataaaccaaatctgatacatccacatttaaggttgttttccaagttggtttccataaaaggcctttaacaataataggcttttaacaacaaaaaggtatccctcccatcacaatgagagcttgatgagggctcaaaagtgacttcaaaaactgtaaataattattttccttggacggctttaaaaacagctactgatagcaaatcagaaacactaaagaaaaaagacaataaggaaacagctgtttgtctagtgaatccataataaataccaatttgaggctatagattacaaagccaaaatattcttataggaaagttaatgtttatatttacaatcccatggactaaaaaaactgtctaatatcttaaagactgagtctacctttatttaacattgtttatacacaaagacccaagggatggtagaattcttgatccttctggacaaaagcatagtgagaggggactgaaattaacaaaaag

SEQ ID NO: 3169 - DNA, 494 bp, Homo sapiens
acttctacacatctgcctaacttgggaatgaatgtgggagaaaatcgctgctgctgagatggactccagaagaagaaactgtttctccaggcgactttgaacccattttttggcagtgttcatattattaaactagtcaaaaatgctaaaataatttgggagaaaatattttttaagtagtgttatagtttcatgtttatcttttattatgttttgtgaagttgtgtcttttcactaattacctatactatgccaatatttccttatatctatccataacatttatactacatttgtaagagaatatgcacgtgaaacttaacactttataaggtaaaaatgaggtttccaagatttaataatctgatcaagttcttgttatttccaaatagaatggactcggtctgttaagggctaaggagaagaggaagataaggttaaaagttgttaatgaccaaacattctaaaagaaatgcaaaaaaaaagtttatttt

SEQ ID NO: 3170 - DNA, 359 bp, Homo sapiens
acagttggagtctgtgtgttttcttgaatgtttgagacagcttcaccttgaactttgaatttctcagcagctgctagttgtgcttgctgggataaatcttcgatcttggcttccccaaaaactatgtaagtatctgaagcagggctcttgtagacatctggttttgtgatgacaaagaggatattcttagatttccggatagtgactctagtaactcctgtaacctgccgaagacccagtttggacatagccttccgtgccttcttttcactccgactctgttttgctttactgactggttcttcatcgatttcagctgctgccgccagctgggcttgttgtgtggttgcctggtggaa

SEQ ID NO: 3171 - DNA, 304 bp, Homo sapiens
acatgctgccaagggtcgggtgccaagagagagcagaatgaagccaggtccccaaggaagtgagggcccaaaatagggagtgtgggtgatgagggtggagttcaaatccagatgtcatagctacaatcgcccccagggtagcggagctcatgggcaagggctgggccaccgggctccttcccgaagtccaccaggaagttggggttcaacttcagccctccttttactgtgtctacatcaacctgcagcatcacagagccttccctgatgagatcagggtaaaactgcttgtcccaggcactgt

SEQ ID NO: 3172 - DNA, 414 bp, Homo sapiens
actacactgaattcacccccactgaaaaagatgagtatgcctgccgtgtgaaccatgtgactttgtcacagcccaagatagttaagtgggatcgagacatgtaagcagcatcatggaggtttgaagatgccgcatttggattggatgaattccaaattctgcttgcttgctttttaatattgatatgcttatacacttacactttatgcacaaaatgtagggttataataatgttaacatggacatgatcttctttataattctactttgagtgctgtctccatgtttgatgtatctgagcaggttgctccacaggtagctctaggagggctggcaacttagaggtggggagcagagaattctcttatccaacatcaacatcttggtcagatttgaactcttcaatctcttgca

SEQ ID NO: 3173 - DNA, 293 bp, Homo sapiens
actcagcagatccaaacgccatcgatacggactattaccctggaggctacgacatcgaaagtgattttcctccacccccagaagacttccccgcagctgatgagctaccaccgttaccgcccgaattcagcaatcagtttgaatccatccaccctcctagagacatgcctgccgcgggtagcttgggttcttcatcaagaaaccggcagaggttcaacttgaatcagtatttgcccaatttttatcccctcgatatgtctgaacctcaaacaaaaggcactggtgagaatagt

SEQ ID NO: 3174 - DNA, 455 bp, Homo sapiens
gtttggctttttgtcttcctttttaaatgctttttgtatgtaatatttttattgatgaatacatctctgaacgttccagaagtcttaaggttccaaagggatttagcagtgaggcagcaatgctgagtaggtaggataattatttcattcagtttttggagctcagttaagccaatacatttaaagttttgcatgaggaacactgactttattaagcattttcagatgtggtggttgtatttttgccccaagaagtgtttggataaccacacaaaagcatgatgaaaaggcttcttgtagtcccataatttcttgtgaactaatgttgtgaatttttgtatacagtcacctgcatagttcctacaggctaatgtggtaaaactgttgatttcccaatttaaccttaggtttctgttgcttataagcgattcatttgctacggctggaatatggga

SEQ ID NO: 3175 - DNA, 521 bp, Homo sapiens
actttcctagatgacatatcgagtcaacatgaagccttagctgaaatgaatgattcaggatattaatgagaaattctcacaaatgatatgcatttaggaaatgattttgctttccttaaatagttcgaaggcttgaaaataaactttttttttgcatttcttttagaatgtttggtcattaacaacttttaaccttatcttcctcttctccttagcccttaacagaccgagtccattctatttggaaataacaagaacttgatcagattattaaatcttggaaacctcatttttaccttataaagtgttaagtttcacgtgcatattctcttacaaatgtagtataaatgttatggatagatataaggaaatattggcatagtataggtaattagtgaaaagacacaacttcacaaaacataataaaagataaacatgaaactataacactacttaaaaaatattttctcccaaattattttagcatttttgactagtttaataatatgaacactgccaaa

SEQ ID NO: 3176 - DNA, 524 bp, Homo sapiens
  misc_feature 470: n = A,T,C or G
acaccagctgaatacggagcaatggtgtttataagcgtttttttaaactatctggtcacaaagactgttacgctaaaaatgtttactaaaagatcactaaactatctcccctcttgctgaagttctttgtagtaatagctcataaaaatttgtttattaatatttcccaagtgtctgttgactcattggactgttatgaggcttgtgccatttggggaacatgtaaactcaggctcccagaactgaagatggtggctggtggcacacttccggctgctcctccgtcacctgtgaactctacaagtgacgtctttttatttcaaagaagtttatttcccacttgtatagcattcacatgctttctttacgatcctcattgtctatttgagaatggttttctgagagtgagtttacattagtagcaagagttgtttgacctgatgttccattgtttttaccattcctgtagnaaaagggtgcacaacagaaaaatgaaaatgatgtgtcatggccgtaaagtatag

SEQ ID NO: 3177 - DNA, 312 bp, Homo sapiens
accaacatcgacagagaaagctacgacgcaataggaggtccatcctggatgacagcttcaagcttctgtctttcaaacagtaacatctggagcctggagatatcctcaggaagcacatctgtagtgcactcccagcaggccatggactagtcactaaccccacactcaaaggggcatgggtggtggagaagcagaaggagcaatcaagcttatctggatatttctttctttatttattttacatggaaataatatgatttcactttttctttagtttctttgctctacgtgggcacctggcactaagggagt

SEQ ID NO: 3178 - DNA, 336 bp, Homo sapiens
actggcttgaacaaaatttgttttgtgtgttagagttataaatcattaatctttatttcgggtggtttacgtttatgccagttcctttatatttaaatttcttgttttatatattttgaatgtctttatagatttctttaaatttccttatagaaccattaatagaaaatcattacatttaaaatataccttacagcaaaagcatccaaataagtatagggtttatgtccttatttttcttccagctgaatacgaatgaacacagtggtggaatttctgaagggaagtgatgaaattatatttatttcagtgggcacttttccattttaccactgt

SEQ ID NO: 3179 - DNA, 322 bp, Homo sapiens
atctgttttaatatagtggtttggcctctgattatttataggttttataaattttagaatcaatttctctttaaggtggctcagatttttcaactcttgtgcacataaaattgagttgaagttcattgtgcctttttttctttatccaaattttgagttaaagcttcatatggtaactgcatcctgttcggacactatagtctaaatttttgaaactgtgtggtgttcgctaaaagtaggaataacaacgtaaaagctaattaaggtcacaaacttcggtgaaacccttaaaagtccaaatcttcttgatattgtgaaccgt

SEQ ID NO: 3180 - DNA, 494 bp, Homo sapiens
acttcagttggtgcacaaaatactgtcatttgctcaaagctggctgccaaatgtttggtgatgaaggcagaaatgaatggctcaaaacttgggagaagagcaaaacctgaaggggccctccagaacaatgatgggctttatgatcctgactgcgatgagagcgggctctttaaggccaagcagtgcaacggcacctccacgtgctggtgtgtgaacactgctggggtcagaagaacagacaaggacactgaaataacctgctctgagcgagtgagaacctactggatcatcattgaactaaaacacaaagcaagagaaaaaccttatgatagtaaaagtttgcggactgcacttcagaaggagatcacaacgcgttatcaactggatccaaaatttatcacgagtattttgtatgagaataatgttatcactattgatctggttcaaaattcttctcaaaaaactcagaatgatgtggacatagctgatgtggc

SEQ ID NO: 3181 - DNA, 352 bp, Homo sapiens
  misc_feature 171: n = A,T,C or G
actattgacccagcgatgggggcttcgacatgggctttagggagtcataagtggagtccgtaaagaggtatctttactataaaagctattgtgtaagctagtcatattaagttgttggctcaggagtttgatagttcttgggcagtgagagtgagtagtagaatgtttagngagcctagggtgttgtgagtgtaaattagtgcgatgagtaggggaagggagcctactagggtgtagaataggaagtatgtgcctgcgttcaggcgttctggctggttgcctcatcgggtgatgatagccaaggtggggataagtgtggtttcgaagaagatataaaatatgattagttctg

SEQ ID NO: 3182 - DNA, 473 bp, Homo sapiens; identical to SEQ ID NO: 2542

SEQ ID NO: 3183 - DNA, 463 bp, Homo sapiens
acctttaaatggtggtgttgtgagaagatggatgttgagttgcagggtgtggcaccaggtgatgcccttctgtaagtgcccaccgcgggatgccgggaaggggcattatttgtgcactgagaacaccgcgcagcgtgactgtgagttgctcataccgtgctgctatctgggcagcgctgcccatttatttatatgtagattttaaacactgctgttgacaagttggtttgagggagaaaactttaagtgttaaagccacctctataattgattggactttttaattttaatgtttttccccatgaaccacagtttttatatttctaccagaaaagtaaaaatcttttttaaaagtgttgtttttctaatttataactcctaggggttatttctgtgccagacacattccacctctccagtattgcaggacagaatatatgtgttaatgaaaatgaatggctgt

SEQ ID NO: 3184 - DNA, 388 bp, Homo sapiens
ctgacagtaaatggggaacaactggatctggatcctggtcaaactttaatttattatgttgatgaaaaagcacctgaattctcaatgcagggtctaaaagctggtgttattgctgttattgtggttgtggtgatagcagttgttgctggaattgttgtgctggttatttccagaaagaagagaatggcaaagtatgagaaggctgagataaaggagatgggtgagatgcatagggaactcaatgcataactatataatttgaagattatagaagaagggaaatagcaaatggacacaaattacaaatgtgtgtgcgtgggacgaagacatctttgaaggtcatgagtttgttagtttaacatcatatatttgtaatagtgaaacctgt

SEQ ID NO: 3185 - DNA, 530 bp, Homo sapiens
  misc_feature 419: n = A,T,C or G
actgtgcaggtgggttagaggctgcgtggcaggagaggttcagattttcccctgatctgtaagatgtgtttagaggggaaatggtgggggcatccgggccatagaggacattcaggatgactgaatcactgcgcctggcactcactgggttctgggtttcacatttgtagcttgctgtgtcatttcttgtgacattgaatagagtgagggtcctgttgccattggacagctgcagcctgggactgaccgggaggctctgattgtttacccaccacaggtaggttgcgtcctgagtctcaggttcacaggtgaaggccacagcatccttgtcctccacgggtttggagttgttgctggagatggagggcttgggcaactccgggtatacccggaactggccagttgcttcttcattcacnagatctgactttatgacgtgtagggtgtagaatcctgtgtcattctggatgatgttctggatcagcagggatgcattggggtatattatctctcgaccactgtatgcgggc

SEQ ID NO: 3186 - DNA, 361 bp, Homo sapiens
  misc_feature 357: n = A,T,C or G
acatgggaagtgcctgctcacgctaagcccagtctgcagagggcaggtcctccctgaaggaaggtggcagagaggaatgtgtctatcaggtatggacaagagagatgaaagaaatgtgctcttcaactaaaggcacttgtcagcggccacctacagccattctctaggcctggtgagcaagcagggtgctgttttgatagaagcctacaaggtctgagcagacctcacttgtcctctcaccaggtttaaatacaataaataaatcttaatgcatggtggttttgtcctcctgggttcctatgaagaggctaccttttaggatcacttatggagtgatactccctgtccccaacccancctt

SEQ ID NO: 3187 - DNA, 312 bp, Homo sapiens
  misc_feature 129, 140, 199, 225, 248, 255, 295: n = A,T,C or G
caagctttttttttttttttttttttttttttttgattttaatatgatattttattatgggtgtctgtaaggaaaaaaaagatcaacaaccacatacaagcttacaaagttaaatttcaacacattctntatgctagtgngacaaaagcagccccataatttggtttttattgttgacctttacaggatgaaggagganaatcccctgtggcatgccaatgaatntttctgatgggagacatgtacanattttgngcatttatgttctgaatgcaagtcaacaattctgatctanagtttaaaagtgaaagt

SEQ ID NO: 3188 - DNA, 486 bp, Homo sapiens
  misc_feature 227: n = A,T,C or G
accttaggtttagaactccattccattaaaagttttctttggttctgtaatgtaggtaaagttttatgcagagttcttttcgatttgaatgaagagtgacttaaggaggaaaacaaaatttgggtagtttctttttctctctttttctctgtctctctctctcttctctttctttttaaaataggaataacaaaacatattgtaagaagcctggttggtcagagganattgtctgtgttaattaggagaatgtttgtcaggcagcatgaaatcatttgttaattactgtttttaatcttatcagattattgttatttttccaactttcctccgtttctaatgttcttctttttctttctttctttctttttttttctgggcctgaaattaccttttgctaatccagtttgtgtggagagatagagtgccagattgggagttaggggactccttccttctttttgttttaactttagtccttcattg

SEQ ID NO: 3189 - DNA, 147 bp, Homo sapiens
accctgcttctgctggcttaatgcctcagaactttggtgtcattggtctcagacaccactttgccatccactatccggcgggtggtggtcttttggatggtttgcatggagttgctgctgtccaaggcatcaccaagattaaagtcc

SEQ ID NO: 3190 - DNA, 336 bp, Homo sapiens
  misc_feature 310: n = A,T,C or G
acagcattctggaataaagcaaaagagtgttcattcacacacacagtagcttcaaaactgttcgatctgtttgttcccatgtagttttctaaagatggaaaaaaaggactttggtcatcaagactactgtggccatattagattactggaacatctaagcatcagtgtgtgaccatgcgaacaaaagacttcggggagtgtctatttttaccccggtttatgtgtgtcgaggcagttgtaaaagatttactgcagaatcaagcccacttttaggcttaggaccaggttctaactatctaaaaatattgantgataacaaaaagtgttccaaatgtg

SEQ ID NO: 3191 - DNA, 482 bp, Homo sapiens
  misc_feature 448: n = A,T,C or G
actgataactaaaggctacagagatttcatatattttttttaacttttagaaatcagagtgcttataaaatggctggctcatggctctgtcacccagcacctctgacgccgcctcctagccttcgttggtgagataaccaggaatagtgattccatgcgtaaacaacaagaatactaaaccaataaaactagcttatcatgcaaatattaaggcatctagaaagtcagttaaaatatattgtcatagagacagaacatctatttcccagcggacttcatgtaacaaaggctacgttgcaggagctgcgatctaccatcagtgaaatatcatcgaccctttttatgtcattacagtttcaaccttaagggaattagtgattgtaagtgctgcaattgctggtctattatcttctttcttcagtttctttcctttctgcctttgtgttgntttgtccagtcttcctcttttccttttttttatt

SEQ ID NO: 3192 - DNA, 364 bp, Homo sapiens
  misc_feature 320: n = A,T,C or G
acggatgctacttgtccaatgatggtaaaagggtagcttactggttgtcctccgattcaggttagaatgaggaggtctgcggctaggagtcaataaagtgattggcttagtgggcgaaatattatgctttgttgtttggatatatggaggatggggattattgctaggatgaggatggatagtaatagggcaaggacgcctcctagcttgttagggacggatcggagaattgtgtaggcgaataggaaatatcattcgggcttgatgtggggaggggtgtttaaggggttggctagggtataattgtctgggtcgcctangaggtctggtgagaatagtgttaatgtcattaaggagagaatga

SEQ ID NO: 3193 - DNA, 311 bp, Homo sapiens
acaattcgtatttgctttcctctttcctttcttcagacaaacaccaaataaaatgcaggtgaaagagatgaaccacgactagaggctgacttagaaatttatgctgactcgatctaaaaaaaattatgttggttaatgttaatctatctaaaatagagcattttgggaatgcttttcaaagaaggtcaagtaacagtcatacagctagaaaagtccctgaaaaaaagaattgttaagaagtataataaccttttcaaaacccacaatgcagcttagttttcctttatttatttgtggtcatgaagactatc

SEQ ID NO: 3194 - DNA, 498 bp, Homo sapiens
accagctacttgggaggctgaggcaggagaatggtgtgaacccgggaggcgaagcttgcggtgagccgagatcacgccactgcattcagcctgggtgacagagcgagactccgtctcaaaaaaaagaaagaaaattggaacctaaggagttaatgcagacacaattaatcattctttctgtgtgctaccccctagggtttggtcaataaatcggtatttttataatagaaggtaaacacagccctaattcatacacaatcacttgtttgcttgcttgctagagcctgtcgaattttattgggatcatttatgcggttgtgattcttggatctatcgttgagagttgtatgaggtattttatatagttttatccgtcacataagttcttgctgacagtagtggacttaacagattgatggtccagggatatgtaaattgtctgttgacctaatttttagaagaaaagcagaatagtgaaggtcagctggaagatggaaa

SEQ ID NO: 3195 - DNA, 442 bp, Homo sapiens
actgaggaatgaatagaaaggcttccagatgtctaaaagattctttaaactactgaactgttacctaggttaacaaccctgttgagtatttgctgtttgtccagttcaggaatttttgttttgttttgtctatatgtgcggcttttcagaagaaatttaatcagtgtgacagaaaaaaatgttttatggtagcttttactttttatgaaaaaaaaaaattatttgccttttaaattcttttcccccatccccctccaaagtcttgatagcaagcgttattttgggggtagaaacggtgaaatctctagcctctttgtgtttttgttgttgttgttgttgttgttttatataatgcatgtattcactaaaataaaatttaaaaaactcctgtcttgctagacaaggttgctgttgtgcagtgtgcctgtcactactggtctgt

SEQ ID NO: 3196 - DNA, 508 bp, Homo sapiens
gtggttgtcctggctggtgccttgttagaagaagcggagcaattgctagaccgaggcattcacccaatcagaatagccgatggctatgagcaggctgctcgcgttgctattgaacacctggacaagatcagcgatagcgtccttgttgacataaagggcaccgaacccctgattcagacagcaaaaaccacgctgggctccaaagtggtcaacagttgtcaccgacagatggctgagattgctgtgaatgccgtcctcactgtagcagatatggagcggagagacgttgactttgagcttatcaaagtagaaggcaaagtgggcggcaggctggaggacactaaactgattaagggcgtgattgtggacaaggatttcagtcacccacagatgccaaaaaaagtggaagatgcgaagattgcaattctcacatgtccatttgaaccacccaaaccaaaaacaaagcataagctggatgtgacctctgtcgaagattataaagcccttc

SEQ ID NO: 3197 - DNA, 223 bp, Homo sapiens
acaccgcctccacaggcagcaggaaaggcttctccaggtcccgggcgggcactgggatgtaagtgtccacagcatccagtagcttctgcacagacttcaggcctaactcagggtcccgaccctcaagggcacagagagcagagcctacgatgactggggtctcctcccctttatagccaaactcggtgagcagctcccggatctccagttccaccagttccac

SEQ ID NO: 3198 - DNA, 519 bp, Homo sapiens
  misc_feature 448: n = A,T,C or G
acacaatggtttattaaaggaatgtatggcccacatcaacctagcaaggattctactggtaaaccttcctatggccaaaggaaaaacaagcaggagttgagtggctggggtggggtgcaggcaatggagagagggcagaagggtgtagaagctgaaggggtctagaagcttactcctgagtttcttccttctgtcttcaaatctttacttcttatggccaaagacccagctgtttcataggctggagatgcactcttctagactgctcgagacagccagagacaggggaggagggaagaaggatactgtggaaagggatggcggggcaaacatttagagctagaagccactactgggccaatgctaaagtttctgtctctaagcctaaaaaagccagtgtagtagggcccttatcactcttagtttgctaggtttcccctctgaaatnatgagcagatttagccaggctagcagaaaggaagaaggacggggctgtgcaggagttagcagaatcttgat

SEQ ID NO: 3199 - DNA, 418 bp, Homo sapiens
  misc_feature 38: n = A,T,C or G
ccagagctgatcctccctaggccctgcctaaccttganttggcccccaatccctctggctgcagaagtccccttacccccaatgagaggaggggcaggaccagatcttttgagagctgagggttgagggcattgagccaacacacagatttgtcgcctctgtccccgaagacacctgcaccctccatgcggagccaagatggggaatggaactgaggaagattataactttgtcttcaaggtggtgctgatcggcgaatcaggtgtggggaagaccaatctactctcccgattcacgcgcaatgagttcagccacgacagccgcaccaccatcggggttgagttctccacccgcactgtgatgttgggcaccgctgctgtcaaggctcagatctgggacacagctggcctggagcggt

SEQ ID NO: 3200 - DNA, 547 bp, Homo sapiens
  misc_feature 533: n = A,T,C or G
aaaagaattccttcttaaaatcaaaaacaaaacaaaaaaacacattctaaatactagagataactttacttaaattcttcattttagcagtgatgatatgcataagtgctgtaaggcttgtaactggggaaatattccacctgataatagcccagattctactgtattcccaaaaggcaatattaaggtagacagatgattagtagtatattgttacacactattttggaattagagaacatacagaaggaatttaggggcttaaacattacgactgaatgcactttagtataaagggcacagtttgtatatttttaaatgaataccaatttaattttttagtatttacctgttaagagattatttagtctttaaattttttaggttaattttcttgctgtgatatatatgaggaatttactactttatgtcctgctctctaaactacatcctgaactcgacgtcctgaggtataatacaacagagcactttttgaggcaattgaaaaccaacctacactcttcggtgcttanagagatctgctgtc

SEQ ID NO: 3201 - DNA, 321 bp, Homo sapiens
  misc_feature 141, 269, 279, 290, 297: n = A,T,C or G
actgataacttcttgcttcagttcatctacaatgatctttccctctaaatcccagatcttgatgctggggcctgtggcagcacacagccagtagcggttagggctgaagcacagggcgttgatgatgtccccaccatctancgtgtaaaggtgtttgccttcgttgagatcccataacatggcctggccatccttgcctccagaagcacagagggatccatctggagagacagtcaccgtgttcagatagcctgtgtggccaatgtggntggtcttcancttgcagttanccaggtnccataccttgaccagcttgtccca

SEQ ID NO: 3202 - DNA, 202 bp, Homo sapiens
  misc_feature 153, 155, 191: n = A,T,C or G
acttgaactggagggcaagaagtggagagtggaaaatcaggaaaatgtttccaacctggtgattgaggacacagagctgaaacaggtggcttacatatacaagtgtgtcaacacgacattgcaaatcaagggcaaaattaactccattacagnanataactgtaagaaacttggcctggtattcgatgacntggtgggcatt

SEQ ID NO: 3203 - DNA, 436 bp, Homo sapiens; identical to SEQ ID NO: 2886

SEQ ID NO: 3204 - DNA, 531 bp, Homo sapiens
  misc_feature 523: n = A,T,C or G
acctccagctgataactccgcgccccacgctgcccccacccagttggcgccaaagaccacaggcggagcttgcgctacccctcctacttggaattgacactagctgggagggggctgccgaagacagctccctatacaacatggaacagaaagacttgtatttagtcggacccatgtctactttgccagaccctcggccactgcgggagggcagggcccaggcgcatttaaggcttaaatgcacatcacatggaaactgactctgccattcatttgatgcaaccatgggcaagtcacttgtccctctctggcctcagtttccctaaaccgagtgagtagcaatttttcaaaacgtctgccaactccaggacttgccgtttaaacctccctctccaagagaggagatactcacctggaggtgtcaggacacggccgagtcagtggcaaaagctccttttgtcgttggagatgacaagttccggagcgagctcggctgtctgattagaggaaaagggggaagagntacgcgag

SEQ ID NO: 3205 - DNA, 441 bp, Homo sapiens
  misc_feature 369: n = A,T,C or G
acaaatatctgaatttcagatctggcttttgctagatagatcctaaaaatgaagaaaacattttccctttccagatactttaataatttaaaatataaataattgtattaagtcccactgaataaagaatgtgaaagtttttgtattaaaaaaaaaaaaacttaagagtttgaagcttgatagtcatttcattttatggtgggacagagactggattttgcttgctttccataattacttcactgtctccctccatttcaaaattgacattcacaaatgagctggatatcactgtctctggttgatctgtctgaacaatggaatcagtctgcaatttattctgttgatattgtttttctgcttcttcanacatcctgttttcttcttcttcttcttcttcctccttcttcatccgataatattcatcaatggcatattggt

SEQ ID NO: 3206 - DNA, 538 bp, Homo sapiens
acctatatcatatctgttctcaactttgtttgattctccactcattttcaatcagagttgaagccttctttgcctttcttctttgtcttatttctgccttcatctcccacttctcacccaactctgccactgttcaggagcagttgactaaacttttatccttcctttaacttaatctttttatccttctgtttttagttcttacagtggtaatcacatcagtttggcaatctaagatgtctttatcaagggtcagcccttttctatttggagctgaatcttttctttcatgtagaaatctacatgtatatacaagaaatgtatttttatctgcaggataatattgtttcaaataattttattaagagttaactttttaggtattttcccttttaatgtggttttgaaatgttaattgcatttttacacatgatgcattcagtggacactcttttttcctaattataactcatctctgaatgcattgtgccaatcaagagtaagataggattcagtgcgcaaaatttgcttttgatgc

SEQ ID NO: 3207 - DNA, 422 bp, Homo sapiens
acaatttgttatagtatagtatcaaatttctatatagattttatacctcagtggggaaaaataactgattccaatgacattcattttgttttcatctgtgatagtcatggatgcttttattttccttggggtgctgaaattgagctgaaaaaaaaggctctttgaatatagttttaatttctctctacagttttttttgtttggtttgtgggctgttggaattgtaatttttaattgccttctaaaaaatggaaatttaacaatgtctgatctcagctgaacaaattagatgtttcagttgctcttgggtcaactggcttacagatttacatgtgcacacacacacaaatttcttatcacattttcgacttcttcacttgacctaactgattatgcgaaatacccaagattcatgctactgt

SEQ ID NO: 3208 - DNA, 566 bp, Homo sapiens
  misc_feature 406, 529: n = A,T,C or G
actacactgaattcacccccactgaaaaagatgagtatgcctgccgtgtgaaccatgtgactttgtcacagcccaagatagttaagtgggatcgagacatgtaagcagcatcatggaggtttgaagatgccgcatttggattggatgaattccaaattctgcttgcttgctttttaatattgatatgcttatacacttacactttatgtacaaaatgtagggttataataatgttaacatggacatgatcttctttataattctactttgagtgctgtctccatgtttgatgtatctgagcaggttgctccacaggtagctctaggagggctggcaacttagaggtggggagcagagaattctcttatccaacatcaacatcttggtcagatttgaactcttcaanctcttgcactcaaagcttgttaagatagttaagcgtgcataagttaacttccaatttacatactctgcttagaatttgggggaaaatttagaaatataattgacaggattattggaaatttgntataatgaatgaaacattttgtcatataagattcata

SEQ ID NO: 3209 - DNA, 382 bp, Homo sapiens
actctcccactcactcagctggggactgctagaactacgtgaacacaccatacttcaatgctgcagagcatgcacgggagacacaatgaggccccctccttgggacagttgagaaaggcaggaggaagggcaaaggaagtgaggctgggcgggaaagcttgagcccagacacccaggtgaaagagcaacatctatctgttgcttcctttcttaaaaatgaagtggagaaaatactgaagatttgtggacaactaacagtcaagacatgtttctgtctagcctgctgaacaaggaaagaaggatgaaaaagcgaggctctcgggcgtcagcaatctcttcaaattcgagataagtgcaaaaatgagccctgtcttggacaggt

SEQ ID NO: 3210 - DNA, 509 bp, Homo sapiens
ttcaacccagccatgcaatgccaaataatagaattgctccctaccagctgaacagggaggagtctgtgcagtttctgacacttgttgttgaacatggctaaatacaatgggtatcgctgagactaagttgtagaaattaacaaatgtgctgcttggttaaaatggctacactcatctgactcattctttattctattttagttggtttgtatcttgcctaaggtgcgtagtccaactcttggtattaccctcctaatagtcatactagtagtcatactccctggtgtagtgtattctctaaaagctttaaatgtctgcatgcagccagccatcaaatagtgaatggtctctctttggctggaattacaaaactcagagaaatgtgtcatcaggagaacatcataacccatgaaggataaaagccccaaatggtggtaactgataatagcactaatgctttaagatttggtcacactctcacctaggtgagcgcattgagccagtggtgc

SEQ ID NO: 3211 - DNA, 332 bp, Homo sapiens; identical to SEQ ID NO: 2495

SEQ ID NO: 3212 - DNA, 223 bp, Homo sapiens
actttggtagctatttaaataagaggggggtgggaatgaatgtcgagatacgagcacctgcatcttttagtcaattgtcagtggagtcagtggggtgctaagtgttctgaactgaagtaggtgcactaaggttccaagctccctgcaaggatctggacgggaggaaagcagaggccctgaagggaaaaaagcctgcttcccaatacttattttttattactgt

SEQ ID NO: 3213 - DNA, 548 bp, Homo sapiens
  misc_feature 435: n = A,T,C or G
tagctactgatgtcttactttgagtttatttatgcttcagaatacagttgtttgccctgtgcatgaatatacccatatttgtgtgtggatatgtgaagcttttccaaatagagctctcagaagaattaagtttttacttctaattattttgcattactttgagttaaatttgaatagagtattaaatataaagttgtagattcttatgtgtttttgtattagcccagacatctgtaatgtttttgcactggtgacagacaaaatctgttttaaaatcatatccagcacaaaaactatttctggctgaatagcacagaaaagtattttaacctacctgtagagatcctcgtcatggaaaggtgccaaactgttttgaatggaaggacaagtaagagtgaggccacagttcccaccacacgagggcttttgtattgntctactttttcagccctttactttctggctgaagcatccccttggagtgccatgtataagttgggctattagagttcatggaacatagaacaaccatgaatgagtggcatgat

SEQ ID NO: 3214 - DNA, 212 bp, Homo sapiens
acaattaaagtattataacagaaataacaacaatgaaaggagaaataggcttctggatagaaaattccttttgttgccaataaataagaccacctgagtgtatttcagattcttttcacttaagggatatccaaattgattgctaagaatattaaatagcttttggaaaaatgagcaacagtcgtgcagctgtggcatttgcttgttcttgt

SEQ ID NO: 3215 - DNA, 210 bp, Homo sapiens
actttatggaataaattttaagaactaaaatatattttattttaaataaagtaatggacctttaatcttacacagctaaattactgattatatatttgctgagctgatttaagggttaaaaaaattgtatcaagagttttattttttgacttcaaagccttcttaataaagcctcttttctacatgtgaaaaaaaaaaaaaaaaaaaaaa

SEQ ID NO: 3216 - DNA, 481 bp, Homo sapiens
acctaatcttcaagcttaaaatttaagttaaaattaatctctattttgtgggcaccctttagtgaactaaaatctacatgaaaccttttggcttttgtgtagcaggaaatacccacgttttgggtcaattagtgcagatgggagcagcagaggagctacaccagacagcaaagcaagactagagcaaacgagaaggaccagcccctagcccctctgtgctcccgggaggacctgggctgttttcacctaattacacccaactttgcttaaaagtcgtataatcagacactattctcagcacaagtttgataaatatacaaaaaccaggttcaatttcatcgtgagtttctttccattctgatccttgtatccaattcaatagttacatccctctttatcatatagtatccaggtttaatgtctgtgcttgtttgtattttaggacagaggcgggctttcagattcagaatcaactgcactc

SEQ ID NO: 3217 - DNA, 501 bp, Homo sapiens
acagattattgatgatgagcctcaagcccagaccagtggtggagggtgctgttcttctggataactgttcacgcctaagaaattaaaagacagaacaaaactgtggatcattgccctcaacatgaagactgccatattccaagtcacattattttaccaatggaattatagaattaacagtattttaaattacgtttataacactgcagagaccttaagtgctaaacttagtggagtttgtgaccagagaattggcattttctacaaatgtttttttttgtttttttttgtttttttttgtttttttttgagacggagtctcactctgtcacccaggctggagtgcactggcttgatctcggctcactgcaagctccacctcccaggttcacgccattctcctgcctcagcctcccgagtagctgggactataggcgcccaccacgacgcccggctaattttttgtatttttagtagagacggggtttcaccaggttagcc

SEQ ID NO: 3218 - DNA, 212 bp, Homo sapiens
accttctgcaaaaataggttacataatactcagaaatgcaatgaacaatcttattctctaaaaattagacagctaagacttcttaagtgtagacagccttcaaaatggaggctgaaaatgcttggtaaaaagaagtaactctagagccagacaccacagagctaaggctgcaaattaaaccactaccacacagctgcaaactactctttata

SEQ ID NO: 3219 - DNA, 176 bp, Homo sapiens
acaaagtttgtaaaatatcagaggatatatatatatatattgtttctacgacatggtattgcatttatatctttttactacagtgatctgtgacagcagcagcttcatgttgtattttttttactgaaattgtaaaatatccatcttaaagacatcaactattctaaaaattgtgt

SEQ ID NO: 3220 - DNA, 300 bp, Homo sapiens
  misc_feature 184, 197, 210, 291, 294: n = A,T,C or G
acttcagttggtgcacaaaatactgtcatttgctcaaagctggctgccaaatgtttggtgatgaaggcagaaatgaatggctcaaaacttgggagaagagcaaaacctgaaggggccctccagaacaatgatgggctttatgatcctgactgcgatgagagcgggctctttaaggccaagcagngcaacggcacctncatgtgctggtgngtgaacactgctggggtcagaagaacagacaaggacactgaaataacctgctctgagcgagtgagaacctactggatcatnatngaacta

SEQ ID NO: 3221 - DNA, 487 bp, Homo sapiens
  misc_feature 387, 388, 389, 390, 436: n = A,T,C or G
cggagccacatgacacaaaggaagagaactccagagatttggaagaattacctaaaaccagttctgagacaaatagcactacctcaagggtcatggaagaaaaagatgaatatagcagcagtgaaactactggtgaaaagccagagcagaacgatgatgacaccataaaatctcaggaggaagatcagccaataattattaaaaggaaaagaggaagacctcgcaaataccctgtagaaacaacgttaaaaatgaaagacgactccaaaacagatactggcattgtcactgtagaacaatctccatctagcagcaaactgaaagtaatgcaaacagatgaatccaataaagaaacagctaacctacaagaaagaagtataagcaatnnnngatggtgaagaaaaaatagtaacaagtgtgcgtcggagaggaaganaacccaaacgttctctcactgtatcagatgatgctgaatcctcagagccag

SEQ ID NO: 3222 - DNA, 333 bp, Homo sapiens
attggccgagcagctgccaagaacaaaggccgcatctcccgatacctggcaaacaaatgcagtattgcctcacgaatcgattgcttctctgaggtgcccacgagtgtattcggggagaagcttcgagaacaagttgaagagcgactgtccttctatgagactggagagataccacgaaagaatctggatgtcatgaaggaagcaatggttcaggcagaggaagcggctgctgagattactaggaagctggagaaacaggagaagaaacgcttaaagaaggaaaagaaacggctggctgcacttgccctcgcgtcttcagaaaacagcagtagt

SEQ ID NO: 3223 - DNA, 394 bp, Homo sapiens
actgataacttcttgcttcagttcatctacaatgatctttccctctaaatcccagatcttgatgctggggcctgtggcagcacacagccagtagcggttagggctgaagcacagggcgttgatgatgtccccaccatctagcgtgtaaaggtgtttgccttcgttgagatcccataacatggcctggccatccttgcctccagaagcacagagggatccatctggagagacagtcaccgtgttcagatagcctgtgtggccaatgtggttggtcttcagcttgcagttagccaggttccataccttgaccagcttgtcccagccacaggagacgatgatagggttgctgctgttgggcgagaagcggacacaagacacccactctgagtggctc

SEQ ID NO: 3224 - DNA, 283 bp, Homo sapiens
ggctcatccacaaatgccttgagacagctacaaggatttccattttatggtaaaccaatgcgaatacagtatgcaaaaacagattcggatataatatcaaaaatgcgtggaacttttgctgacaaagaaaagaaaaaagaaaagaaaaaagccaaaactgtggaacagactgcaacaaccacaaacaaaaagcctggccagggaactccaaattcagctaatacccaaggaaattcaacaccaaatcctcaggtccctgattaccctccaaactatattttat

SEQ ID NO: 3225 - DNA, 212 bp, Homo sapiens; identical to SEQ ID NO: 3218

SEQ ID NO: 3226 - DNA, 524 bp, Homo sapiens
accccaagccactgaccagcctgggactgccccctgatgtccagcgagtggatgccgcctttaactggagcaaaaacaagaagacatacatctttgctggagacaaattctggagatacaatgaggtgaagaagaaaatggatcctggcttccccaagctcatcgcagatgcctggaatgccatccccgataacctggatgccgtcgcggacctgcagggcggcggtcacagctacttcttcaagggtgcctattacctgaagctggagaaccaaagtctgaagagcgtgaagtttggaagcatcaaatccgactggctaggctgctgagctggccctggctcccacaggcccttcctctccactgccttcgatacaccgggcctggagaactagagaaggacccggaggggcctggcagccgtgccttcagctctacagctaatcagcattctcactcctacctggtaatttaagattccagagagtggctcctcccggtgcccaagaatagatgctgactgt

SEQ ID NO: 3227 - DNA, 261 bp, Homo sapiens
  misc_feature 91, 160, 226, 237, 248, 260: n = A,T,C or G
actctgaggcttgtaggagggtaaaatagagacccagtaaaattgtaataagcagtgcttgaattatttggtttcggttgttttctattanactatggtgagctcaggtgattgatactcctgatgcgagtaatacggatgtgtttaggagtgggacttntagtggatctagcggggtgatgcctgttgggggccagtgccctcctaattggggggtaggggctangctggagtggnaaaaggctcanaaaaatcctgcna

SEQ ID NO: 3228 - DNA, 411 bp, Homo sapiens
actgaaatttgtcacctttctctacaaacccccagcaatccaatccaagtccatagcttcagaaagccaggagttgtgtcttcagtcagtctacgcctctggttcttggtttttctttcatgggagggagatcacaatatttcaaacagggaacaaaaccagttgagcttccagctcaggtctgtgtaagatggagcgaggaaagaccccactgactccagagaaaaagggtaaggttgagatggattatttctttacagctttgtgaaaatggaagaaaaagatttacaaatgaggatccatttcatagatgagaatctcttcataaatgaaggctccagctcctaaaatgggaggggcctgactggacagcctgaatcagatgaggaatcggccacactgaataaaaac

SEQ ID NO: 3229 - DNA, 388 bp, Homo sapiens
acccgcaggagcagccctgtgtcctggaaacggaagattttctcagatgtggacaaatggagaccttcaaatacagcaaagagagggaagagccccaggaacatgagtggctgcaggtggaacatggtgtcgatgggattctggaggccgagttcagccttctgcaggagcatctgggtgagggtccagcgaatgccaccgatgaacgaggcccccagcaccaaggcgaagccctccacgttgaactgtgtggacttgtaggtgaacatgaagagacccccggcgatgaggaggaccaccaggaccagtgccgcgcgcagctcctccagcttgaagatcagagagaagatcaagatgaagaggacagctgaggatttggtcattgtgt

SEQ ID NO: 3230 - DNA, 406 bp, Homo sapiens
acagaaaacccaaaggcaaccacatagcatatgtaaaatgtgcaaatacactttaaaatgcaagttattctatagcatttgcaagatagaatttcactgtaattagggaatctagttcatcctaacttaatagtcttttgcatgtatagacaatgcaattctacaaggcacaactcagcgttgatgctaaagtatgaaacacatcctcagattatttatttgaaaatattaaaatagcatcgtttattattttttaatgagtcatgagctcatttctaaagcttcataaagcattacactgataacatatgtgtggtcaggacaaactgttccctgaacttaaaaggtgaaggacaagaccccatattattatcctgtattaaaaaaggaaatatacatatatgta

SEQ ID NO: 3231 - DNA, 485 bp, Homo sapiens
acagcattctggaataaagcaaaagagtgttcattcacacacacagtagcttcaaaactgttcgatctgtttgttcccatgtagttttctaaagatggaaaaaaaggactttggtcatcaagactactgtggccatattagattactggaacatctaagcatcagtgtgtgaccatgcgaacaaaagacttcggggagtgtctatttttaaaaaggtttatgtgtgtcgaggcagttgtaaaagatttactgcagaatcaagcccacttttaggcttaggaccaggttctaactatctaaaaatattgactgataacaaaaagtgttccaaatgtggctattctgatccatagttgttttttaaagaaaaaaaatgtatatacagaaagagtataaaagtttgtgaatttaatgcaaattagcttccagtcttcacttcccaaatacttgatttatagttttgactcctttacatttttgccttc

SEQ ID NO: 3232 - DNA, 483 bp, Homo sapiens
  misc_feature 407: n = A,T,C or G
accaattttgtttttacagaaaagataaaactcaaaagagaacagtgtattccttctgaggggcttttataaattattaactataatatatgatggatttttcctaattttttatatttccttacaattttggtggccattaatttaattttaggcttttgggcatatgctagtctgagcttccgaaaagatacatatatgtttcccttttcattagctgaatgaggatattttaagaagttgaaagagaatttattttcaagttgtgagtaaatcctcctttgaaattcacctgattattagataacttaaagtttatttttaaaagctgacaactttttatgaatcttcgagttgacagttcctaaaagcgtaactcagatattaatgggctgtgtattaaatgnttttattttcagttttgcagcacagaacactgttgaaatatccatatcaacttgatttttttacctaattcaggtg

SEQ ID NO: 3233 - DNA, 528 bp, Homo sapiens
  misc_feature 438: n = A,T,C or G
actactacaaacgggagatcctggaacgggtggatggccggcgactcgtctacaagtttggcaaaaactcaagcggctggaaggaggaagaggttctccagagtcggaactgagggttggaactatacccgggaccaaactcacggaccactcgaggcctgcaaaccttcctgggaggacaggcaggccagatggcccctccactggggaatgctcccagctgtgctgtggagagaagctgatgttttggtgtattgtcagccatcgtcctgggactcggagactatggcctcgcctccccaccctcctcttggaattacaagccctggggtttgaagctgactttatagctacaagtgtatctccttttatctggtgcctcctcaaacccagtctcagacactaaatgcagacaacaccttcctcctgcagacaccntggactgagccaaggaggcctggggaggccctaggggagcaccgtgatggagaggacagagcaggggctccagcaccttctttctggact

SEQ ID NO: 3234 - DNA, 210 bp, Homo sapiens
actgggtggccacatccccaatggggagtttggacaagacaactttggctccagaatgatggatcttctctaacttgtcatagagaatgttccactcagcatcaacaattgcctgataatcctcaactgtgtggactcttatctcagcattgtctttctcagctttcaactcgagctcgacattcaaaagggcaatcttgggattgtggt

SEQ ID NO: 3235 - DNA, 372 bp, Homo sapiens
  misc_feature 273: n = A,T,C or G
acgggggccagccgggggtattcagccatcgatcaaactcaaaacctggaatgatatccactctctttttcttaagctcagggaaatattccaagtagaagtccagaaagtcatcggctaagatgcttcggaatttgaattcatgcacataggccttgagaaaactgtcaaactgatcctgatcacccaccaagtgggccaggtatgagacaaagcagaaacctttctcgtagggggtctcattataggtgtcgtccgggtcaacgcttggtncaatcttcacgcggagcttgttgagtgggttttcctctccagtgatgtccatgtgctgacgcagcagagcccgccccgttgcagcctccaagcaggtgt

SEQ ID NO: 3236 - DNA, 522 bp, Homo sapiens
actgattttaaaaactaataacttaaaactgccacacgcaaaaaagaaaaccaaagtggtccacaaaacattctcctttccttctgaaggttttacgatgcattgttatcattaaccagtcttttactactaaacttaaatggccaattgaaacaaacagttctgagaccgttcttccaccactgattaagagtggggtggcaggtattagggataatattcatttagccttctgagctttctgggcagacttggtgaccttgccagctccagcagccttcttgtccactgctttgatgacacccaccgcaactgtctgtctcatatcacgaacagcaaagcgacccaaaggtggatagtctgagaagctctcaacacacatgggcttgccaggaaccatatcaacaatggcagcatcaccagacttcaagaatttagggccatcttccagctttttaccagaacggcgatcaatcttttccttcagctcagcaaacttgcatgcaatgtgagccgtgtggc

SEQ ID NO: 3237 - DNA, 334 bp, Homo sapiens
actatgaatagcttcttgctttatgactttaggattaacttgtaaaaaacatatcctgaactgagatatgcaaaatactcattttcaagttatggaaatgtgtttgtggcatataggactgtggggtctgtgtgtgtagtgagagtgtgtagccactattataactggaatttaatttacattcataaactactatatttcccatcttgcaaatcattttatgtctcatctgtttttcctttcggttatatctttggttttgaataccaacatttaaaatgatggtattttatcttttaaacttaaaaattatttaatacagctatatggacct

SEQ ID NO: 3238 - DNA, 251 bp, Homo sapiens
acattaactgcatttttaaaaatcagaataataggtagaaggaaggatacagaaagcacatttggggatagattttaatgaaattttccatatggttctgcattaatttagaatacattacaataaacagagcaaatgcaattatgtatttatattaactatttcaaataatgtttaagaacctttttttaaaaaacaataaaataccctcttcaaaacaccactaactagaaagtcaaactagatcatta

SEQ ID NO: 3239 - DNA, 314 bp, Homo sapiens
  misc_feature 271, 275, 276, 277: n = A,T,C or G
acacctcctaaaataaaaatattgatgggctctacattctggagacacgggcagtagaactattattttcagcttgaaatattagctacactttggtaaaaatacttttgaactttatcttcacagtcgcggcaaggaaaacaaaaggtataaacattcattggttgaaaaacaatgtcataaagttgtccccgtatctgtggggggttggttccaggactcctgaggatactaaaatcctcagatgctcaagcccctgataaaaaatggngcannntttgcatataacctacccacatcctcctgcacagttt

SEQ ID NO: 3240 - DNA, 428 bp, Homo sapiens
gaaaatgtcaacctttgtaagaaaaccaaaataaaaattgaaaaataaaaaccataaacatttgcaccacttgtggcttttgaatatcttccacagagggaagtttaaaacccaaacttccaaaggtttaaactacctcaaaacactttcccatgagtgtgatccacattgttaggtgctgacctagacagagatgaactgaggtccttgttttgttttgttcataatacaaaggtgctaattaatagtatttcagatacttgaagaatgttgatggtgctagaagaatttgagaagaaatactcctgtattgagttgtatcgtgtggtgtattttttaaaaaatttgatttagcattcatattttccatcttattcccaattaaaagtatgcagattatttgcccaaatcttcttcagattcagcat

SEQ ID NO: 3241 - DNA, 349 bp, Homo sapiens
  misc_feature 337, 341: n = A,T,C or G
actggagagctgttcacacagatgtttagacctttctctctctctctctctctctctctcttttcttctttctcaacaactctttcacagaggcagtcattttgaaaggttgaaatatttggcctttaccaaagagctttttttttccttaagcaaaatcctttcagaaagaaacaaatggggaagggcagattaagaatgcatatgtcccaatccacttctataggagtttaatcatattcacatgagtaaaatgatggaagaactctttaaggtaatcctttgggataaaggatcctgggaagttctctcaggtaaagaaagcttacagcagatntgtnatatatgt

SEQ ID NO: 3242 - DNA, 193 bp, Homo sapiens
  misc_feature 95, 137, 169: n = A,T,C or G
acattagcaccataacatgcgtctttaaagccttcccaaatattagtaatcttgaccagcaatgacaagaaaaaagaggagcacctttacaagcngttgatatccaatattaaaataattgtggctttaaaaatatntctttaaattcttgcattacacttttcttttnaaaccaatctcctggaagattggt

SEQ ID NO: 3243 - DNA, 429 bp, Homo sapiens
  misc_feature 394: n = A,T,C or G
accactgggggatggaagaactccaaggagagccccagctgggtcctaataccccaggagccttctggcttcttcactttgggcctgcagggtctcgcttgcatacttctggaggagttccattttcttccttcgcaccagtgcctcctcaatctcttgctgcgagggaacagggacgtgagcaatgaacttctgctggctgtcgtcccctcctttctcctggctgccttcctcgtccgactacaaacagaacaaacgaaagtccatcagtaggcgcccagctagataaatgctggcaactctataaaacacactactctgcaactatttaaaagaaaaaaaaactaagaaagttctatacttatagaaagacacttgacccacaagattaagnaaaaaaagccatagaacacgctgtatattatgcta

SEQ ID NO: 3244 - DNA, 437 bp, Homo sapiens
accaatatgccattgatgaatattatcggatgaagaaggaggaagaagaagaagaagaaaacaggatgtctgaagaagcagaaaaacaatatcaacagaataaattgcagactgattccattgttcagacagatcaaccagagacagtgatatccagctcatttgtgaatgtcaattttgaaatggagggagacagtgaagtaattatggaaagcaagcaaaatccagtctctgtcccaccataaaatgaaatgactatcaagcttcaaactcttaagttttttttttttaatacaaaaactttcacattctttattcagtgggacttaatacaattatttatattttaaattattaaagtatctggaaagggaaaatgttttcttcatttttaggatctatctagcaaaagccagatctgaaattcagatatttgt

SEQ ID NO: 3245 - DNA, 408 bp, Homo sapiens
acaaggtgtcagagtatgcacggcgctttggtgttccggtcattgctgatggaggaatccaaaatgtgggtcatattgcgaaagccttggcccttggggcctccacagtcatgatgggctctctcctggctgccaccactgaggcccctggtgaatacttcttttccgatgggatccggctaaagaaatatcgcggtatgggttctctcgatgccatggacaagcacctcagcagccagaacagatatttcagtgaagctgacaaaatcaaagtggcccagggagtgtctggtgctgtgcaggacaaagggtcaatccacaaatttgtcccttacctgattgctggcatccaacactcatgccaggacattggtgccaagagcttgacccaagtccgagccatgatgt

SEQ ID NO: 3246 - DNA, 278 bp, Homo sapiens
  misc_feature 234: n = A,T,C or G
acctgtgggtttattacctatgggtttatatcctcaaatacgacattctagtcaaagtcttggtaatataaccaatgttttcaaatgtattctgtcatacaaagagcagatttttattgaacttgtgcaataactatattaccatacaatataaatattcatgaatagtttcccaagtctggagcgaccacatagggagaaaatgtaaatgtttcaatttttgttcacaaaagnatattttatcaaattgctgtaagctgtggatagcttaaaagaaa

SEQ ID NO: 3247 - DNA, 517 bp, Homo sapiens
actcatgcccgactgtctaccaggcacacagactttgaggagagggcgtatgtcgtcttgatccgcatcaatgatgggggtcggccacccttggaaggcattgtttctttaccagttacattctgcagttgtgtggagggaagttgtttccggccagcaggtcaccagactgggatacccactgtgggcatggcagttggtatactgctgaccacccttctggtgattggtataattttagcagttgtgtttatccgcataaagaaggataaaggcaaagataatgttgaaagtgctcaagcatctgaagtcaaacctctgagaagctgaatttgaaaaggaatgtttgaatttatatagcaagtgctatttcagcaacaaccatctcatcctattacttttcatctaacgtgcattataattttttaaacagatattccctcttgtcctttaatatttgctaaatatttcttttttgaggtggagtcttgctctgtcgcccaggctggagtacctg

SEQ ID NO: 3248 - DNA, 351 bp, Homo sapiens
acttacacagaaactaattgagacattgaaaccctttggggtttttgaagaggaagaggaactgcagcgcaggattttaattttgggaaaactaaataacctggtaaaagagtggatacgagaaatcagtgaaagcaagaatcttccacaatctgtaattgaaaaagttggaggaaaaatttttacatttggatcttacagattaggagtgcatacaaaaggtgctgatattgatgcgttgtgtgttgcaccaagacatgttgatcgaagtgactttttcacctcattctatgataagttgaaattacaggaagaagtaaaagatttaagagctgttgaagaggcattcgt

SEQ ID NO: 3249 - DNA, 320 bp, Homo sapiens
  misc_feature 91, 104, 125, 157, 179, 186, 187, 190, 204, 269, 292, 307,315: n = A,T,C or G
cagcgcctgcttcctcggccctgaaatcatgcccctaggtctcctgtggctgggcctagccctgttgggggctctgcatgcccaggcccangactccacctcanacctgatcccagccccacctntgagcaaggtccctctgcagcagaacttccangacaaccaattccaggggaagnggtatgnnggnaggcctggcagggnatgcaattctcagagaagacaaagacccgcaaaagatgtatgccaccatctatgagctgaaagangacaagagctacaatgtcacctncgtcctgtttagganaaagaagngtgac

SEQ ID NO: 3250 - DNA, 367 bp, Homo sapiens
  misc_feature 279, 315, 327: n = A,T,C or G
actcagaaaaacatctaaagctgttggagaagagggactcatataaatagttggattgcgttttgctttttatttctttataaaaatatgtcaaaaacagtttttaattttagaaatcttatacttgaaagaaacctcaattatcagtggctttatgaagtaaagttaaaaacaaacataggaaatgtgaaaatatttgtgtttgttttgtctgactaacttgctgctaaatgctatctttaggtgtgtgaaagttctttgatatgttattgtccttcnacatcttgttaaatagccattgcttttgagaatcanatagtgtgttgnttaggggttaattgtgtctatatctttcaaaacttttata

SEQ ID NO: 3251 - DNA, 103 bp, Homo sapiens
  misc_feature 90, 94, 95: n = A,T,C or G
acaagcttttttttttttttttttttttttttttcttttttttttttttttttttttttttttgtttttttttttttttttttttttttnggcnntaaagggg

SEQ ID NO: 3252 - DNA, 540 bp, Homo sapiens
acaaaatgaaatagacagacttaatgaacaagccagtgaggagattttgaaagtagaacagaaatataacaaactccgccaaccattttttcagaagaggtcagaattgatcgccaaaatcccaaatttttgggtaacaacatttgtcaaccatccacaagtgtctgcactgcttggggaggaagatgaagaggcactgcattatttgaccagagttgaagtgacagaatttgaagatattaaatcaggttacagaatagatttttattttgatgaaaatccttactttgaaaataaagttctctccaaagaatttcatctgaatgagagtggtgatccatcttcgaagtccaccgaaatcaaatggaaatctggaaaggatttgacgaaacgttcgagtcaaacgcagaataaagccagcaggaagaggcagcatgaggaaccagagagcttctttacctggtttactgaccattctgatgcaggtgctgatgagttaggagaggtcatcaaagatgatatttggccaaacccattaca

SEQ ID NO: 3253 - DNA, 482 bp, Homo sapiens
accactaatcgggccaatatggcttgtgagcaaaatgggtgaaaatagagggaactgactgggacctgttgtctaacatcattttaaggttgaacttgagcaaagacttagagaaagctgatggaatgccaagcatcaacgtgaagagaccctctatgcacacagtggatatgttatgcctggctgtagccaccttctcttctgaaaacaagatgggaatgacggaactgtattaaaagattaagttatccactagggagcatactagcacacttccagatcagccttgagatgctagacttcagatacagggacttgtgtcaggtggcctctagaaatgtggaagactaagatttagaaataaactaatttaaaagcaaacaaacaaaaaaaactttcgcctaggatgatctgtttacaacagaaacaaaaacattttccagtttaatccatttgactgaaagtcattgttgggctgaccc

SEQ ID NO: 3254 - DNA, 530 bp, Homo sapiens
actatctcaatagctgtatagctaacttatgtaaatcatatttatgctaattgaagagaatatatttcaccttcaggatattgtattcattttttctagccttaataaacattttataaatactgacactggggataaagttactgataatattatatttactttggcttcgcagagtaaaaattgttattcagtcacatacaacattctcgcatttttttagtcaatcctcaaactacctgagatgtaaccattattactcagttataaaaagaaaccaagattcaggtatactaaataatttgtgagtattcatgacagaacatggcaggtttgattgcaactctgtttgattccaaagtgtttgctctttccacttcatcgtaatgtatttccactttatcataatgtatttctggcaagaagcataagaatcaaaaacgtgacctgaaaaactactatggaattatttttaagtggtttgcatagactttgtttttagactttgtttaacttttcccaaaagttgt

SEQ ID NO: 3255 - DNA, 320 bp, Homo sapiens
aaatactttaatgtataaaataaatattatacaatatacttgtatagcagtttctgcttcacatttgattttttcaaatttaatatttatattagagatctatatatgtataaatatgtattttgtcaaatttgttacttaaatatatagagaccagttttctctggaagtttgtttaaatgacagaagcgtatatgaattcaagaaaatttaagctgcaaaaatgtatttgctataaaatgagaagtctcactgatagaggttctttattgctcattttttaaaaaatggactcttgaaatctgttaaaataaaattgt

SEQ ID NO: 3256 - DNA, 324 bp, Homo sapiens
  misc_feature 98, 264, 277, 314: n = A,T,C or G
actcagaactgtgtaaaagttaaccaccaaaaccatgttttaaagaaaaaagtttaaatgtaagactaatgtcttggggactttactaaatgtatttntaaaaaaacccttctcaaatgtagaagtattggcaattctaatttaaaaattttaaatttttaattattggaaatttaagtagcaatagtttcaagagctaagaatcagattgctttttaaaacagaattttttttttttcctgagggactcatacttgacaactncagttaaacatantactccacccaaatcccaaatttaaatgcattatgtnaccctggaat

SEQ ID NO: 3257 - DNA, 384 bp, Homo sapiens
acccagccttgctctcattcccaggacaggaacaggagagcagtgcacctcccaggatgactagggcagaccctgcccagccaataaagatggcagggccaaactcatacttaatgttggtagggatcaaagggttataaaagtctgtgacaatctgatggccataccaggagcaagctaccaaggcggcaagacctgccacgatgaaaattatgcctccacccatggctatacgggccttcttcactttgtcgtctcccccacagcgcgtgcacttcatgcccatcgtggccacaaacatggccaggaagcccagcaccagggagaccaccattagggctcgagtggcctgcaaggccgcggacagggcgagcaccgagtcgt

SEQ ID NO: 3258 - DNA, 448 bp, Homo sapiens
actctgaggcttgtaggagggtaaaatagagacccagtaaaattgtaataagcagtgcttgaattatttggtttcggttgttttctattagactatggtgagctcaggtgattgatactcctgatgcgagtaatacggatgtgtttaggagtgggacttctaggggatttagcggggtgatgcctgttgggggccagtgccctcctaattggggggtaggggctaggctggagtggtaaaaggctcagaaaaatcctgcgaagaaaaaaacttctgaggtaataaataggattatcccgtatcgaaggcctttttggacaggtggtgtgtggtggccttggtatgtgctttctcgtgttacatcgcgccatcattggtatatggttagtgtgttggttagtaggcctagtatgaggagcgttatggagtggaagtgaaatcacatggc

SEQ ID NO: 3259 - DNA, 338 bp, Homo sapiens
  misc_feature 175, 226, 235, 237: n = A,T,C or G
caaaccttttttttttttttttttgctttcaagtttattaaagaagatcactaaagatattgactagagaatgctgtgtgctatttcaattacatttgtttttcttttattaacaggaattttgattcttcaaggaagtggctcaatttcaatttcaggtgaccaggtttatcgngacttttccttcttgtttacttttcgctaggaaggggagttgtaggggcanattcaggtntnggaataggaaaattacgtctaaaccatggaaatcttggaaatggaattggtggaagtgggcgaaatggatatgggtaagggaacacaaaaaaccctgaagc

SEQ ID NO: 3260 - DNA, 531 bp, Homo sapiens
  misc_feature 526: n = A,T,C or G
acaacaaagcaatgttaccttaccataggccttaattcaaactttgatccatttcactccaatgacgggagtcaatgctacctgggacacttgtatttgtaaattctgatttagcttattgtagacttgtgcctactttgtcatgagggtttgacttctgcattcttcgtggctttccttcctttggcttaggtttgctaaagctagaagattcaattgctctttacagacttatgaggaagatagactttgtaacgcagatgtcacttctcatgccagccctgccctggttagctcttctggaggaatactgcagataagaaaatagttatttgggaggctccctcagtgtggtaggaattgagactaacacaattttggttaagtccactgaggtatgagtttatagaactccactgtatgtatccagctatactagaacattttgccaagacactggaggactctttcattatctactgtgaagaataaagacttagaggctatataataagttctggattgngtgtg

SEQ ID NO: 3261 - DNA, 377 bp, Homo sapiens
  misc_feature 10, 271, 337, 356: n = A,T,C or G
acacaatggnttattaaaggaatgtatggcccacatcaacctagcaaggattctactggtaaaccttcccatggccaaaggaaaaacaagcaggagttgagtggctggggtggggtgcaggcaatggagagagggcagaagggtgtagaagctgaagggggctagaagcttactcctgagtttcttccttctgtcttcaaatctttacttcttatggccaaagacccagctgtttcataggctggagatgcactcttctagactgctcganacagccagagacaggggaggagggaagaaggatactgtggaaagggatggcggggcaaacatttanagctagaagccactactgngccaatgctaaagtttctgtc

SEQ ID NO: 3262 - DNA, 410 bp, Homo sapiens
gggctccaaatggtaaagaaaaactttgagtgggttgcagagagagtagagttgcttttgaaatcagaaagtcagtgcagggttgtagtgttgatgggctctacttctgatcttggtcactgtgaaaaaatcaagaaggcctgtggaaattttggcattccatgtgaacttcgagtaacatctgcgcataaaggaccagatgaaactctgaggattaaagctgagtatgaaggggatggcattcctactgtatttgtggcagtggcaggcagaagtaatggtttgggaccagtgatgtctgggaacactgcatatccagttatcagctgtcctcccctcacaccagactggggagttcaggatgtgtggtcttctcttcgactacccagtggtcttggctgttcaaccgt

SEQ ID NO: 3263 - DNA, 506 bp, Homo sapiens
gtggagagataatgggcaatgtttctcagggctgcttcaagcgggattaggggcggcgtgggagcctagagtgggagagattaagctgaagggaggtcttgtggtaaggggtgatatcatggggatgttagaagaaacatttgtcgtatagaatgattggtgatggcctggatacggttttggatgatttgagaagctaaatggaagatacaaggtccgaataaaaggaggagaaaaatgggtattaaatgtctaagaattgggaggacctaggacatctgattagagagtgcctaaggagattcagcatagtcctgccagcaaagattatttacttcaagagttaagagtggcagtttggggatagcaccaggagatatcagctgtgatggcttggagaaacagtgtaaacccggcagtgtaaacaagagcagggcatgtatgagtagttgagaacggggaataggagtatgactagacagaagatagtagggatgacaagtttt

SEQ ID NO: 3264 - DNA, 416 bp, Homo sapiens
  misc_feature 28, 33, 160, 205, 249, 393, 407: n = A,T,C or G
tttttttttttttttttttttttgattnaaaanattttattttctttatgcaggtaggcagttagaaatttcaaagtctaacaatgacattcttgaagtgggcacagccttttaaactcaggctatgtatacagtaaccttgtggaactggttcagccanatcttcactttcatgaaagcacagggtctgtccttttctttccanagggctcctctcatattccatcgccagtttctgttacaaggcanactgaatcaagccaagatcaacacacactggtacacgtggctcccaaccaattttatatgtatatatatattctacttccaacacccgcattcatcctggttcaatcaaagcctggttttggccaacaataaactcgtcagganatcgaaggttgtanatgtctgca

SEQ ID NO: 3265 - DNA, 535 bp, Homo sapiens
actgccatttgggattttttacatgtcttagcttaaagaactggtctttagcaaatattcaacagatcaacctgaataaaatagtcaattaaatgctctaatttatcagaaaaaatccactaagtttcacctcaaaatgtattgcacaagtctttttaaaaaatcaccctaaaaataaataggaaaggcaagccgttctttaaaaagaatggatgaaaggaatattatgtaagcccataaagcaggttaagttatcaaaatatcttttaaacaacataaaactcttcccaagagaaaactgaagaaaaaactatcaccatttctccactgataaaatctattttaaaggcagtctgcaacttatctgtgggccagatttttcttggtcttttggctacatgaggggccctgaatgacaacttcattctcaaagagtagcaagtgtggacagttttccaagcagcagtcacccaatgtcactcttcttcaagatgaagatcggagccatgacacatgttaactaagcacagactga

SEQ ID NO: 3266 - DNA, 510 bp, Homo sapiens
acagcattctggaataaagcaagagtgttcattcacacacacagtagcttcaaaactgttcgatctgtttgttcccatgtagttttctaaagatggaaaaaaaggactttggtcatcaagactactgtggccatattagattactggaacatctaagcatcagtgtgtgaccatgcgaacaaaagacttcggggagtgtctatttttaaaaaggtttatgtgtgtcgaggcagttgtaaaagatttactgcagaatcaagcccacttttaggcttaggaccaggttctaactatctaaaaatattgactgataacaaaaagtgttctaaatgtggctattctgatccatagttgttttttaaagaaaaaaaatgtatatacagaaagagtataaaagtttgtgaatttaatgcaaattagcttccagtcttcacttcccaaatacttgatttatagttttgactcctttacatttttgccttcttaatttcaagatttgcaattttgcct

SEQ ID NO: 3267 - DNA, 225 bp, Homo sapiens
acagactggccaacctgcctctacagcgtccacagcgaacacagggctagacaagggaggagtttctcaaacggttttaatcggttctctccgcgtcacaagccatcgggtaaggcaacggaatgtgtgtggggtcccctgtggctccgcggtcacaatactgagcctggaattgctgtcagcaaaatatacatttgtgtcaccataaaaaaccgcgccgccgcc

SEQ ID NO: 3268 - DNA, 501 bp, Homo sapiens
  misc_feature 458, 459: n = A,T,C or G
acaactttttgggaaaagttaaacaaagtctaaaaacaaagtctatgcaaaccacttaaaaataattccatagtagtttttcaggtcacgtttttgattcttatgcttcttgccagaaatacattatgataaagtggaaatacattacgatgaagtggaaagagcaaacactttggaatcaaacagagttgcaatcaaacctgccatgttctgtcatgaatactcacaaattatttagtatacctgaatcttggtttctttttataactgagtaataatggttacatctcaggtagtttgaggattgactaaaaaaatgcgagaatgttgtatgtgactgaataacaatttttactctgcgaagccaaagtaaatataatattatcagtaactttatccccagtgtcagtatttataaaatgtttattaaggctagaaaaaatgaatacaatatcctnnaggtgaaatatattctcttcaattagcataaatatgatttac

SEQ ID NO: 3269 - DNA, 437 bp, Homo sapiens
ctcatttaaacattacccagcatcattgtttataatcagaaactctggtccttctgtctggtggcacttagagtcttttgtgccataatgcagcagtatggagggaggattttatggagaaatggggatagtcttcatgaccacaaataaataaaggaaaactaagctgcattgtgggttttgaaaaggttattatacttcttaacaattctttttttcagggacttttctagctgtatgactgttacttgaccttctttgaaaagcattcccaaaatgctctattttagatagattaacattaaccaacataattttttttagatcgagtcagcataaatttctaagtcagcctctagtcgtggttcatctctttcacctgcattttatttggtgtttgtctgaagaaaggaaagaggaaagcaaatacgaattgt

SEQ ID NO: 3270 - DNA, 305 bp, Homo sapiens
acacatattacatacgagtaggcagcagactttaaaaataaaaaaacctaggcatgttgatgttgcaaaatgctgtataaagctgaaacctgttcattcagtgccattgtagttgacatgaagcgattgtaaaactgtctccgatttttctctggtttattaaaatgctaactataacattttttgtgaatactttgaatgtttcctaacagttgtgatgttactgttccgttttatgctcttattccaagttcatttttaatggtttggaagccatttttgtaatgaataaatgttcatgctgt

SEQ ID NO: 3271 - DNA, 266 bp, Homo sapiens
  misc_feature 204: n = A,T,C or G
acggccagggctattggttgaatgagtaggctgatggtttcgataataactagtatggggataaggggtgtaggtgtgccttgtggtaagaagtgggctagggcatttttaatcttagagcgaaagcctataatcactgcgcccgctcataaggggatggccatggctaggtttatagatagttgggtggttggtgtaaatgantgaggcaggagtccgaggaggttagttgtggcaataaaaatgattaaggatactagtataag

SEQ ID NO: 3272 - DNA, 390 bp, Homo sapiens
acatgcaatggttacactgaattggtcaccagggtgggatagtggggtggggaggcctcttcctattttgcactttgcattgtcaaagtcacaataagaaaccggactgcagtctgcgtggagcaacaataccaactttggagataaaggccagatgggaaagttaatttctacaaaattaacaaacacttgtatctgctcagtgcttcacaactttcaaggcttttctcaacctcctgatgaccaggcatgcaggctggccaagtggctccccaagctgactcatccctcatcacacagggaggggcctgtaatcagggcccacagagctccagggtccggtttttgcctttcctttttgacagagtcactctgtcgccctggctgaag

SEQ ID NO: 3273 - DNA, 149 bp, Homo sapiens
  misc_feature 110: n = A,T,C or G
actcccctaacctcttttctgcatcatctgtagatactagctatctaggtggagttgaaagagttaagaatgtcgattaaaatcactctcagtgcttcttactattaagnagtaaaaactgttctctattagactttagaaataaatgt

SEQ ID NO: 3274 - DNA, 259 bp, Homo sapiens
accattggtggccaattgatttgatggtaagggagggatcgttgacctcgtctgttatgtaaaggatgcgtagggatgggagggcgatgaggactaggatgatggcgggcaggatagttcagacggtttctatttcctgagcgtctgagatgttagtattagttagttttgttgtgagtgttaggaaaagggcatacaggactaggaagcagataaggaaaatgattatgagggcgtgatcatgaaaggtgataagctc

SEQ ID NO: 3275 - DNA, 600 bp, Homo sapiens
  misc_feature 482, 561: n = A,T,C or G
ttagccaggcatggtggtgcgcacttgcagtcccagctactggggaggctgaggcaggagaactgcttgaacctaggaggcagaggttgcagtgagccgagatcacgccattgcaatccagcctgggcgacagagctagactccaagaaaaaagaaaatgaatgtcagggtataaggtagaaaacagacaaacgtgggctattttgtgatcatcaaccagtcagggaatgaacctaccaattacccaagaattgaacaaacttaaagttattctaaatgtgctttctaaacggataccatttaagtatgctcttaaggagaatattactagaaattaggaggaatattatcattgtccaacatagtttctcttgacagttaactatttagcttttcagttttttcccttttgtggattatgtctagatttaatgttggatagaacactatgtagcatttctgtagtttatcttgttttctgngataaatgcgtccattgattcaactaccctaggaagaattattagaatttcagagtttacttttggattttttgtctgngctttaagggtatgtcttcatttactcattattatgctc

SEQ ID NO: 3276 - DNA, 299 bp, Homo sapiens
  misc_feature 119, 162, 178, 192: n = A,T,C or G
acctaggtgctagtctccccactaactgagggaaaaaggttcccaggtggggtcctctgcccactttgccaccacattcacattccaaatgggataatgcctgaggggccaagagtggncaggctgccctggggtgaatgccaccctgatgaggcccatcanctcttgtccactcagngaggccagacttgngctctaatccactctcctgtgggtccctggcctgtatggcttatactggggagctgggcctctgggctgtccaaacccaagggtcacactttgcttttcctttgttg

SEQ ID NO: 3277 - DNA, 530 bp, Homo sapiens
actcagtatttcaaatcagaacacaagattggaacttttggaaaaatgggttcaagctttcctattagccatggaaatgcaaagtttagcagaagcaagcaattaggcagagaacaaaatgttaagcatggtgttgtctatcttattgaagtggttggaaatgaaagcttttaatttgatagatttatcagtataaaattagggaaaccacgtatggggaatgaatcaatttagagcttcgggaattgtgaggtgacttttgtaacttttgttctgtgtgtgacctgtgaaccactaggatgtgatctgcccttgtgggcaggtccagcatagttaggagttaggctttagcataaatttctagctgcatctgagtctcctgggatgggtgctctttggctggttttggctgcggatggtgagatcagagcagctcttcctgctgctggcccctgcaatcagttgttgggatgccagtgcagatcactaagtagtaagattttaatcaaacacgaccaggtccgaaatgc

SEQ ID NO: 3278 - DNA, 470 bp, Homo sapiens
acaagtgtaatatggacagtatctaacttgaaaagatttcaggcgaaaagaatctggggtttgccagtcagttgctcaaaaggtcaatgaaaaccaaatagtgaagctatcagagaagctaataaattatagactgcttgaacagttgtgtccagattaagggagataatagctttcccaccctactttgtgcaggtcatacctccccaaagtgtttacctaatcagtaggttcacaaactcttggtcattatagtatatgcctaaaatgtatgcacttaggaatgctaaaaatttaaatatggtctaaagcaaataaaagcaaagaggaaaaactttggacatcgtaaagactagaatagtcttttaaaaagaaagccagtatattggtttgaaatatagagatgtgtcccaatttcaagtattttaattacaccttaatgaaattatctattttctatagattttagt

SEQ ID NO: 3279 - DNA, 208 bp, Homo sapiens
  misc_feature 150, 165: n = A,T,C or G
cttagctgccaggaggcagtggagggacgagtgcctcatgagactcgccaagttgaagagtcaagtgcagccccagtgaatttcttgtaatgcagcttccactcctctcattggaggccctatttgggaacactgcaagcccttaatcanccctctgtgacatangtagcagcccacggagatcctaagctggctgtcttgtgtgcag

SEQ ID NO: 3280 - DNA, 109 bp, Homo sapiens
  misc_feature 6, 32, 62, 69, 77, 100: n = A,T,C or G
accgcngccgttaaacatgtgtcactgggcangcggtgcctctaatactggtgatgctagangtgatgnttttggtnaacaggcggggtaagatttgccnagttccttt

SEQ ID NO: 3281 - DNA, 473 bp, Homo sapiens
acagcagtgcgatctcggctcactgcaacctccgtccccgggttcaagcaattctcccgcctcagcctcccaaggagctgggattacaggcctctgccaccacaccctgctaacttttgtatttttagtagagatggggtttcgccatgttggcgaggctggtctcgaactcctgacctcaggtgatccacccacctcagcctcccaaagtgctaggattacaggcatgagccaccgcaaccggcctaaacaggccttgcccaggcaatgagcatccagttagacaggttcttcaaggcctagtaatagttctctggttacaacggtgctcagcttgtctgctaggaatgggactcccatctggacatgtctaggtcagtgttccaaaatatggccagtatggaaggaggtcttatcacatgcttctggatggatggtctggaaggcccttggtgggctctgtgttggctagt

SEQ ID NO: 3282 - DNA, 242 bp, Homo sapiens
  misc_feature 99: n = A,T,C or G
acagaatccctgccctaaaatcccaggcttaattgccctacaaagggttattaatttaaaactccattattaggattacattttaaagttttatttatnaattccctttaaaaatgatatttcaaaggtaaaacaatacaatataaagaaaaaaataaatatattaataccggcttcctgtccccatttttaacctcagccttccctactgtcaccaacaaccaagctaaataaagtcaaca

SEQ ID NO: 3283 - DNA, 481 bp, Homo sapiens
aaaaccggtgaatctgggcttatgggatacagctggacaagaagattatgacagattacgccccctatcctatccgcaaacagatgtgttcttaatttgcttttcccttgtgagtcctgcatcatttgaaaatgtccgtgcaaagtggtatcctgaggtgcggcaccactgtcccaacactcccatcatcctagtgggaactaaacttgatcttagggatgataaagacacgatcgagaaactgaaggagaagaagctgactcccatcacctatccgcagggtctagccatggctaaggagattggtgctgtaaaatacctggagtgctcggcgctcacacagcgaggcctcaagacagtgtttgacgaagcgatccgagcagtcctctgcccgcctcccgtgaagaagaggaagagaaaatgcctgctgttgtaaatgtctcagcccctcgttcttggtcctgtcccttggaacctttgt

SEQ ID NO: 3284 - DNA, 435 bp, Homo sapiens
  misc_feature 336, 416: n = A,T,C or G
acatttggaagaagataaggcaacaaggcaaaatttctataatgttgctagcattttcccaaggtaaagccaggaaacaaacttgtgtcctttctataagaacttctaagtgatgtcccctctaactccatggacagacactagtggtggtgaagttcataaagttttgaggtggcaaacagcttattttgtcctttatcataattggtttacaaattggatgcctggttttggcatactggttcagttgatcaagcgcaggatccctttggtctttgtaagaccagatgtataaggccgaatagggtcaagaacttgattgtaaggagaacgatntactattaccaatcaatattctacaaaacctgcctcttgtttaacccaagcgacagaggtgagtcttctctcctggactntccagatgccttgacaaga

SEQ ID NO: 3285 - DNA, 527 bp, Homo sapiens
gcttttcagaagtgctctgtctgtgtgtcccctcaatgctaaggttcactacaacattggcaaaaacctggctgataaaggcaaccagacagctgccatcagatactaccgggaagctgtaagattaaatcccaagcatgttcatgccatgaataatcttggaaatatcttaaaagaaaggaatgagctacaggaagctgaggagctgctgtctttggctgttcaaatacagccagactttgccgctgcgtggatgaatctaggcatagtgcagaatagcctgaaacggtttgaagcagcagagcaaagttaccggacagcaattaaacacagaaggaaatacccagactgttactacaacctcgggcgtctggtaagcgcggggtgccctgtgcctgtggaaggaaagatgggttatttttcttatttataataaaatgacatagtgacacccacctagcccatacattttataaagttctttcacatgtttctatctcatttgaaggtagctatttgatttcctt

SEQ ID NO: 3286 - DNA, 524 bp, Homo sapiens
  misc_feature 489: n = A,T,C or G
gtggatttggggatggctataatgggtatggaggaggacctggaggtggcaattttggaggtagccccggttatggaggaggaagaggaggatatggtggtggaggacctggatatggcaaccagggtgggggctacggaggtggttatgacaactatggaggaggaaattatggaagtggaaattacaatgattttggaaattataaccagcaaccttctaactacggtccaatgaagagtggaaactttggtggtagcaggaacatggggggaccatatggtggaggaaactatggtccaggaggcagtggaggaagtgggggttatggtgggaggagccgatactgagcttcttcctatttgccatgggcttcactgtataaataggagaggatgagagcccagaggtaacagaacagcttcaggttatcgaaataacaatgttaaggaaactcttatctcagtcatgcataaatatgcagtgatntggcagaagacaccagagcagatgcagagagccat

SEQ ID NO: 3287 - DNA, 501 bp, Homo sapiens
actttgcctacggcagcaacctgctgacagagaggatccacctccgaaacccctcggcggcgttcttctgtgtggcccgcctgcaggattttaagcttgactttggcaattcccaaggcaaaacaagtcaaacttggcatggagggatagccaccatttttcagagtcctggcgatgaagtgtggggagtagtatggaaaatgaacaaaagcaatttaaattctctggatgagcaagaaggggttaaaagtggaatgtatgttgtaatagaagttaaagttgcaactcaagaaggaaaagaaataacctgtcgaagttatctgatgacaaattacgaaagtgctcccccatccccacagtataaaaagattatttgcatgggtgcaaaagaaaatggtttgccgctggagtatcaagagaagttaaaagcaatagaaccaaatgactatacaggaaaggtctcagaagaaattgaagacatcatcaaaaagggggaaacac

SEQ ID NO: 3288 - DNA, 339 bp, Homo sapiens
  misc_feature 3, 36, 126, 198, 234, 250, 259, 298, 329: n = A,T,C or G
tangaggtctggtgagaatagtgttaatgtcattanggagagaatgaagagaagtaagccgagggcgtctttgattgtgtagtaagggtggaaggtgattttatcggaatgggaggtgattcctanggggttgtttgatcccgtttcgtgcaagaataggaggtggagtgctgctagggctgcaataatgaagggcangatgaagtgaaaggtaaagaatcgtgtgagggtggnactgtctactgagtancctcctcanattcattgaactaggtctgtcccaatgtatgggatggcngatagtaagtttgtaattactgtggcccctnagaatgatat

SEQ ID NO: 3289 - DNA, 472 bp, Homo sapiens
cttactgtaagtggtgtatatgaaacctccatgcattttccagtatggatctgctaatatgcacagtaaatccatgtctttgtttgtttttctattaaaaagcaatcaagaaagataatgtgaaaaagaaaggaatttagaggtagggaaaagatgaatgtcagacatttgaagaactatagtaaaatgataaacactaaatatacttgagaaaactttcttaatatgccaatgaggtaggcctgatctttgaaatagtgaataggaatacaatgcatttcctcagtgatcactgattagaatgagttggtgggatccttgggaagccaaacggagcggagttctggatcatgtcccatccagtccagtgaatccacgacccgcagacctgtccccccgcaacagcttataccatggaatgaggacaaggtgatactctgagctgtggactgaactggcagacacaacctgt

SEQ ID NO: 3290 - DNA, 531 bp, Homo sapiens
acactgttggtgttatatggggatggggttctcggtaattttgtttattatttatgtttattattatgttttatcattaattattcaataaatttttatttaaaaagtcaccctacttagaaatcttctgtgggggtgggagggacaaaagattacaaaccaaaactcaggagatggtaacactggaattgataaaatcacctgggattagttgtataactctgaaccaccaaacctctgctatcaagccttgctacagtcatggctgtccagaaagatttacagttatttttctgagaaaggatccatgggctttaagaacttcagaactttaagaacttcagaagttcttaagttgctgaagctcaagtaacgaagttgaatgcaatcaaaaaaagaataccagggagtcaaggcttgagaggcacattcttatcctaaagtgactgctcaaacctgacgagaccaagtaaattactgaagatacaaagagacaaaatgcagattaccgtccttattcctataactcaa

SEQ ID NO: 3291 - DNA, 531 bp, Homo sapiens
  misc_feature 507: n = A,T,C or G
accgctggccggggagggccggaagccgcgcctgcaccggcgacatcgcgtctataagctggtggaggacacgaagcatcggcccaaagaaaacctggagctcatcctgacgcagtcggtggagaatgttggagtccggggtgacctggcctcagtgaagaaatctttaggccggaatcgactccttcctcagggactggctgtatatgcatcccctgaaaacaagaagctgtttgaagaggagaaattgctgagacaagaaggaaaattagagaagatccagaccaaggcaggtgaggcgacagtgaaatttctaaaaagctgtcgcctggaggtagggatgaagaacaatgtcaaatgggagctgaaccctgaaatagttgcccgccacttctttaagaatcttggtgttgtggttgccccacatacattaaagttaccagcagagcctatcacacggtggggcgagtattggtgtgaggtgacggtaaatgggcttgatactgngagagtgcctatgtctgtcgtgaa

SEQ ID NO: 3292 - DNA, 348 bp, Homo sapiens
actagagaaatgttgctggagataaaccataaaatttgtgacactaacgtggcatggggtgaatcacataagctgctagctgttgaacaccagtgtttcaagatacaacttttataaacgttttatttgttttgcttataccatcagaactgaaactactgtccgtgatttccctgaaacagggaaatcaatctaaaacacatactggtgcctttcaaaagatagcaattgaaaagggtggtagcagcaggcatttggtatcttttccttttaaaaaaaagctttcaagctgaaggaaaaacatgtgaccgagagtgttatgattatccactagagattttcatcagt

SEQ ID NO: 3293 - DNA, 385 bp, Homo sapiens
acaagctcttatattcacttggcatcaaaatagtccaaaataaatctgagaaccacggcaagttatagctgtgttaatgacaaaatgtgatatttactgtttaaatttagcagctgggagaatccccttataaggaagacagaaaatacatttatatccagactgcattactctttggaaaaatatgaccaatcagattttgggtattattgttacaaccttttccttcacctctgcatcatggtgatcaactaaagctcttattttctgggcacattcttctccatgtaacaggaaaaacaatgaaccttcagtgaaagtaggctgcacagctaaatggccttctattttgaggcagttctttatattctgaaatagcgtaagt

SEQ ID NO: 3294 - DNA, 184 bp, Homo sapiens
  misc_feature 29, 30, 34, 118: n = A,T,C or G
acatcataaaaaagtgcttgtcctgtggnntcanctgggaggccctggcgctggggctaaggggcccaaggcaccatccaaaggctgggaggaaagaacccaaacccaggccctcctnctgccctccagccgtggacaggcaactcatttggcatgatctgttttggtgtgtttaaaacataca

SEQ ID NO: 3295 - DNA, 557 bp, Homo sapiens
  misc_feature 501, 554: n = A,T,C or G
acaggtcagagtcttcttttcttttctttttgagatggagtcttgctctgttgccagactggagtgcagtggtgcgatctgggctcactgcaatctccacctcccgggttcaagcgattctcctgcctcagcctcccgagtaactgggactacaggtgcgcgccaccaagcccagctcatttttgtatttttagtagagatggggtttcacgatgttggctaggatggtctcgatctctggccagagtcttttctgtaaatatccttggtaaagaagcaattttagactgtagctgttgcaaatgctttaaggaagaagcaaaacaactgtcagtcttcctgaaatgaagaaactacaccagggctgctatatcagagcaaccccaaccagcactccaatcatgatgccgacagtggccccagctgagagaccaggagaagttccagatgcagagactgtgatgctcttgactatggaattattgcggccagtagccaagntagagacaaaacaggcataggtcccgttattatttggcgtgattttggcgatnaag

SEQ ID NO: 3296 - DNA, 574 bp, Homo sapiens
acacattgaaatacagaaaaggtgagaggaagcaactttcattgtatcgtagcaataaactccacactgggtgacatctacctagaaatcccttccctctaaccaggccatgatggaaacctttgctgcctgcccttggagaaccccggattggcttccctgggactcaggtctggtggcaggagggcagcagtgtgcccccaccatccctcatggcctgccgccagcagggccataatggcaggactttgatttgacttccagccccacatgaggaggggggctaccaagccaggtgcagtgtttgtggccctttatttaagttgttttcttatattattctgcatataaacaatgacgtttaaatggaaaaaacaacaacaacgaaaacctccattgggtggagccacactttaaatgaaaatttctctttgactatgctcaaaaaaaaaatagaattttgaatatatttagcagttgttgtctatttttaactaactccatatgctgccagtatcgacttcatgacatttgccaaaataaaattttatttttgcctttataagattttctt

SEQ ID NO: 3297 - DNA, 411 bp, Homo sapiens
acagcccttttagcccccagctctggagtggcagacagcaatgaggccacatccctggagctgcccgggggaagtgggtgaggaaccaaagccgtggtccctgtagagcagctgtggggaggggagggccagtcccctgctcagtcctgaccacataagccttggtcacaggtgtaggtggagagggcactgacggacactgccctaaggtgcagtcctgaggcacttaggtgggcgcctatctaggccatgcttctcagttggccttgaccttggcaatacctggagctccattttgctgaagtgcacggggcagccgcttgcccttggtataagagtgataccagaagttggagaacagcatgaagaagatggtgccatacatccagatgaggtgaataatgactgggt

SEQ ID NO: 3298 - DNA, 404 bp, Homo sapiens
acagcattctggaataaagcaaaagagtgttcattcacacacacagtagcttcaaaactgttcgatctgtttgttcccatgtagttttctaaagatggaaaaaaaggactttggtcatcaagactactgtggccatattagattactggaacatctaagcatcagtgtgtgaccatgcgaacaaaagacttcggggagtgtctatttttaaaaaggtttatgtgtgtcgaggcagttgtaaaagatttactgcagaatcaagcccacttttaggcttaggaccaggttctaactatctaaaaatattgactgataacaaaaagtgttccaaatgtggctattctgatccatagttgttttttaaagaaaaaaaatgtatatacagaaagagtataaaagtttgt

SEQ ID NO: 3299 - DNA, 306 bp, Homo sapiens
accacttcttctgcctgtcccaacattgcagcttcaaaagtttcttcaccttccaaattggccagggttgacagaatagttgctccagaagctttggcaatgcgtttaaggtccctttttaaaactcttctaactgccatagcaccagcctccacaaaatacttcagacacatatcatcaattccaccagtggttagaataacattggcaccagttgccaggatcttctgaattctctccttggtgatatctgattctctctgtctaatttggtccagtttttcagggtctgtaatgaccacctgt

SEQ ID NO: 3300 - DNA, 528 bp, Homo sapiens
acaaaattgctagttcatttttaaattaataacttgaaattacccctgccccccaccccattacatctttttataaacagcaaacattttgctattttatacataggctagcaggcttgtttcaatatgggggtgctaattcatttacagatttttataatcagttatgtagtgctacaataaatgtccaataatctacataggaacaatgatgaaaatgatgaagactgaataaggctatcagatgaccttatcttatttacatataaagaatagatacccaatggtgaggaagagacagaaattggacaaatactcataggtgtaaaaattacatctacctttgagttttatactgtaaatgagacattttaaatagtcctgtagcccatgcctattttttcctcagaaaaagaaaagctgccttcatgacatcccctcgtttcagatttccacagtgtcactttgaagcttcagagtcaggatcttactttcttcaaaaaataaagaaaatactccctctaaggt

SEQ ID NO: 3301 - DNA, 440 bp, Homo sapiens
actgagagaacaaaagcttgtgggtcagcaggccccacaaagatgtgactgcagacaggatcggccctgggagagaccgaggctccaggtgactcctatagcaaggcggtgagggggcgggtctggggctccagttcaggaatacatagtcagctgcagccactcctggatgttcacctggatttgtccagtgccatctttgtcaagagatttgaaggcacggaacatggcatccagcctgaccaagcagctgatgaagttgtcaaaatccatgttcccactttcatctgagtagcgtcggatgatcatgttatagagatgctcattcaggtggaaccctgctgcctcaaaggcacctgggagttcactactgcaaatggtccctgatcggtcagtgtcgaactgtttgtatatggcctgccaccttttgatgttgttcc

SEQ ID NO: 3302 - DNA, 476 bp, Homo sapiens
acagaatgcattttatatgccctgttcaatacaatttaaatcgctgtttcttccatgttgtcccttccctatgaactattcccaaagcctcttccaaggcagaggacagggcagtaagaaggaatggaagaaggcactgaggtcactaagtggggttagggcttagattggataaatccctacccatccccgcccccactcgttctatagaaaagaattctctttctctctccccttgctgggctgttgggatgagggccaggtagaggcaaagggaggaaaacactcagcacattctttctcctactttaatctgaagtgtagctacagcaaagggcacagaatttacaaaaatgtcagggcaagggagcatgtgagcataatccagtctagaaagaaagagggtgcttcccctgccctattatctaaatatgctgggagctttactcccagaactgcaagaagaatgaaaaaga

SEQ ID NO: 3303 - DNA, 197 bp, Homo sapiens
  misc_feature 21, 33, 122, 142, 143: n = A,T,C or G
accctactgccaccagccagntgagcagactangacatctctagacaggaaactcatctaaaaatcggaggacaacctgatgcacccaagtgacaatggacccaggcagctgtgcacaccangtgggaggctttttgaacanntagactcatcagtggataggtttttctagcacaaatggaatgtggtgtctcatg

SEQ ID NO: 3304 - DNA, 449 bp, Homo sapiens
acatcaggaatgatacatgcttgcttggcaagactgctgaaagaacttaaaggaagaattactctaactattgtttcttggcctggcacttttttatagaatcaatgatgggtcagaggaaaacagaaaaatcacaaataggctaagaagttgaaacactatatttatcttgtcagtttttatatttaaagaaagaatacattgtaaaaatgtcaggaaaagtatgatcatctaatgaaagccagttacacctcagaaaatatgattccaaaaaaattaaaactactagttttttttcagtgtggaggatttctcattactctacaacattgtttatattttttctattcaataaaaagccctaaaacaactaaaatgatttgtataccccactgaattcaagctgatttaaatttaaaatttggtatatgctgaagtctgccaagggt

SEQ ID NO: 3305 - DNA, 472 bp, Homo sapiens; identical to SEQ ID NO: 3289

SEQ ID NO: 3306 - DNA, 453 bp, Homo sapiens
  misc_feature 165, 261, 318, 382, 422, 429: n = A,T,C or G
acaaagatctgacatgtcacccagggacccatttcacccactgctctgtttggccgccagtcttttgtctctctcttcagcaatggtgaggcggataccctttcctcggggaagagatatccatggtgggttgcccttgccaataacaaaaatgttggaaagtcnagtggcaaagctgttgccattggcatctttcacgtgaaccacgtcaaaagatccagggtgcctctctctgttggtgatcacaccaattcttcctangttagcacctccagtcaccatacacaggttaccagtgtcgaacttgatgaaatcagnaatcttgccagtctctaaatcaatctgaatggtatcattcaccttgatgaggggatcggggtancggatggtgcgggcatcatgagtcaccagatgagggattncttttgngcccacaaagatctttctcacttt

SEQ ID NO: 3307 - DNA, 588 bp, Homo sapiens
  misc_feature 509: n = A,T,C or G
actttaatttatttcccctttctagtgtattaagaaatgacatgcactttaatttgccaaaagcaatgcttgtattctggcagcaacatgctacttctatcacatagtaaagtgaataccagaactacaaaggcaggaggtgtaagtgaatttttattgggaggggaggttggcaacttaaacagcagcaaataaagagtgaataaggaaactccctgttgccacagatacacaagacctccgtatgtgatacaggagccatttcaatttgcgacccctagacagagatggcaagtgcttttccattcaatctaatacttccggattcctactaaaaaggaatacattaagagcatggaaaagttgcttactgaaaggaaacccccgaagagtaagggagggaatgtagaaattaagaagttatgtggaatactctttaaattgtaattaactacattttcttattttcacagtaatacaaaacacagtcacttgcagaactggttcanattacttaaataccagatacatttttagtcctctacataagtgtttgggagttacttatgtttatatgaaatgaagcta

SEQ ID NO: 3308 - DNA, 463 bp, Homo sapiens
accaccaaggcaaagccaaatttggcttcaattaagagctccacaggaaaattatcaacacaatgcccaggtgcagaagatccttgttttgacacggggtttaagtcgggatgttttgttcaattgtcactgcttccttggcttcccaagagagcagctgagcccagactcaagctggctgcagtgttccatcaggcttatggcttttgtgcttgaggcctccctgccgcttcatgggtcaggtgtgatattcaatcactgccttctatgtagtctggcctgtcccacctttatcttgcctgggtgaggatatgaagaagggaacatatgacattaccactgttgactgagtaggaaagtatataggaagcgggatgacagggaggaccactggatcagccgctgcagttccagacttcaatcaacattttaattaccaagtctatatttagcaagacgatgt

SEQ ID NO: 3309 - DNA, 340 bp, Homo sapiens
acgtgtggcttggtcacttcgtggctaaggtaagaacgtgcttgtggaagacaagtctgtggcttggtgagtctgtgtggccagcagcctctgatctgtgcaaggtattaacgtgtcagggctgagtgttcttggatttctctagaggctggcaagaaccagttgttttgtcttgcgggtctgtcagggttggaaagtccaagccgtaggacccagtttcctttcttagctgatgtctttggccagaacaccgtgggctgttacttgctttgagttggaagcggtttgcatttacgcctgtaaatgtattcattcttaatttatgtaaggttttttttgt

SEQ ID NO: 3310 - DNA, 294 bp, Homo sapiens
gcgcattgagccagtggtgctaaatgctacatactccaactgaaatgttaaggaagaagatagatccaattaaaaaaaattaaaaccaatttaaaaaaaaaagaacacaggagattccagtctacttgagttagcataatacagaagtcccctctactttaacttttacaaaaaagtaacctgaactaatctgatgttaaccaatgtatttatttctgtggttctgtttccttgttccaatttgacaaaacccactgttcttgtattgtattgcccagggggagctatcactgt

SEQ ID NO: 3311 - DNA, 455 bp, Homo sapiens
tctcagtgaaaatccaaaaaccagaaaaaaatgtttatacaaccctaagtcaataacctgaccttagaaaattgtgagagccaagttgacttcaggaactgaaacatcagcacaaagaagcaatcatcaaataattctgaacacaaatttaatattttttttctgaatgagaaacatgagggaaattgtggagttagcctcctgtggtaaaggaattgaagaaaatataacaccttacaccctttttcatcttgacattaaaagttctggctaactttggaatccattagagaaaaatccttgtcaccagattcattacaattcaaatcgaagagttgtgaactgttatcccattgaaaagaccgagccttgtatgtatgttatggatacataaaatgcacgcaagccattatctctccatgggaagctaagttataaaaataggtgcttggtgt

SEQ ID NO: 3312 - DNA, 508 bp, Homo sapiens
acttttttcttatgatgattggtgtagaaatgtgtgatttgggtgggcttttacatcttgcctaccattgcatgaaacattggggtttcttcaaaatgtgtgtgtcatacttcttttgggaggggggttgttttcttctgtttattttctgagactcctacaggagccaaatttgtaatttagagacacttaattttgttaatcctgtctgggacacttaagtaacatctaaagcattattgctttagaatgttcaaataaaatttcctgaccaaattgttttgtggaaatagatgtgtttgcaatttgaagatatctttctgtccagaaggcaaaattaccgaatgccatttttaaaagtatgctataaactatgctactctcatacaggggacccgtattttaaaatctccagacttgcttacatctagattatccagcacaatcataaagtgaatgacaaaccctttgaatgaaattgtggcacaaaatctgttcaggttggtgt

SEQ ID NO: 3313 - DNA, 247 bp, Homo sapiens
acagacaacaaggcagaaattatattgttgaagatggagatattatcttcttcaaatttaacacacctcaacaaccgaagaagaaataaaatttagttattgctcagataaacatacaacttccaaaaggcatctgatttttaaaaaattaaaatttctgaaaaccaatgcgacaaataaagttggggagatgggaatctttgacaaacaaattatttttatttgttttaaaattaaaatactgtgt

SEQ ID NO: 3314 - DNA, 212 bp, Homo sapiens
  misc_feature 199: n = A,T,C or G
acaaagactaagcagtaagttctgtcactgacgcaaactaggatgtcaaagaaaaatagattaactatttttacctaaagtagtgcaaagaaatctggcaaaaaatgaaagtgaactcaatatctgcacatgcagtaatggggcagaattttatttaaaaggctagtggttcaaatactattgcttgaatagctctggnagatataaaatgt

SEQ ID NO: 3315 - DNA, 466 bp, Homo sapiens
acaaacaaattacagaataatgcatataaaagcgctatggactacacgtgacaattctgtttaacttccatcttgatgattttatatcagtatccaaaattatatactccagcattttttccaaatatagtcttacatgatttcaattcctgaggtaaactaagtgtccactgccaacatccttggacgaaaaccaagtcccccgggagaattcagatatttatattcacacatacaatacaacggaattcatcaatgtaatcagatattgcagatttaaaaatggaaaatggactcttgcaatacttctgcatccatatataattttaccagcagggcctcccaaaatgttgtgtaagtatagtttaaatggatttcattaataagtttctgcatttagataaaaattcttggcaatgctagtcagtgttcacttcttacagattagccaagaagtgaacactga

SEQ ID NO: 3316 - DNA, 542 bp, Homo sapiens
  misc_feature 41, 93, 101, 106, 140, 166, 171, 200, 218, 225, 252, 268,271, 274, 277, 349, 370, 385, 403, 477, 485, 490, 501, 507,533: n = A,T,C or G
acaagctttttttttttttttttttttttttttttttcggnttttatttttcaatttttattttggttttcttacaaaggttgacattttccntaacaggngtaanagtgttgaaaaaaaaattcaaatttttgggggancgggggaaggagttaatgaaactgtnttgcncaatgctctgatcaatccttctttttctnttttgcccacaatttaancaagtanatgtgcaaaaaaaatggaaggattcanctttcagttaaaaaanaanaanaanaaatggcaaagagaaagttttttcaaatttctttcttttttaatttaaattgagttcatttatttgaaacanactgggccaatgtccacaaanaattcctggtcagcnccaccgatgtccaaaggngcaatatcaaggaagggcaggcgtgatggcttatttgttttgtattcaatgattggctttccccattcatttgnctttttanagcanccatctacaanaacagngtaagtgaacctgctgttgccctcancaacaagtt

SEQ ID NO: 3317 - DNA, 552 bp, Homo sapiens
acttcagttggtgcacaaaatactgtcatttgctcaaagctggctgccaaatgtttggtgatgaaggcagaaatgaatggctcaaaacttgggagaagagcaaaacctgaaggggccctccagaacaatgatgggctttatgatcctgactgcgatgagagcgggctctttaaggccaagcagtgcaacggcacctccacgtgctggtgtgtgaacactgctggggtcagaagaacagacaaggacactgaaataacctgctctgagcgagtgagaacctactggatcatcattgaactaaaacacaaagcaagagaaaaaccttatgatagtaaaagtttgcggactgcacttcagaaggagatcacaacgcgttatcaactggatccaaaatttatcacgagtattttgtatgagaataatgttatcactattgatctggttcaaaattcttctcaaaaaactcagaatgatgtggacatagctgatgtggcttattattttgaaaaagatgttaaaggtgaatccttgtttcattctaagaaaatggac

SEQ ID NO: 3318 - DNA, 508 bp, Homo sapiens
gtcagaagaacagacaaggacactgaaataacctgctctgagcgagtgagaacctactggatcatcattgaactaaaacacaaagcaagagaaaaaccttatgatagtaaaagtttgcggactgcacttcagaaggagatcacaacgcgttatcaactggatccaaaatttatcacgagtattttgtatgagaataatgttatcactattgatctggttcaaaattcttctcaaaaaactcagaatgatgtggacatagctgatgtggcttattattttgaaaaagatgttaaaggtgaatccttgtttcattctaagaaaatggacctgacagtaaatggggaacaactggatctggatcctggtcaaactttaatttattatgttgatgaaaaagcacctgaattctcaatgcagggtctaaaagctggtgttattgctgttattgtggttgtggtgatagcagttgttgctggaattgttgtgctggttatttccagaagaagag

SEQ ID NO: 3319 - DNA, 323 bp, Homo sapiens
acagcattctggaataaagcaaaagagtgttcattcacacacacagtagcttcaaaactgttcgatctgtttgttcccatgtagttttctaaagatggaaaaaaaggactttggtcatcaagactactgtggccatattagattactggaacatctaagcatcagtgtgtgaccatgcgaacaaaagacttcggggagtgtctatttttaaaaaggtttatgtgtgtcgaggcagttgtaaaagatttactgcagaatcaagcccacttttaggcttaggaccaggttctaactatctaaaaatattgactgataacaaaaag

SEQ ID NO: 3320 - DNA, 579 bp, Homo sapiens
  misc_feature 504: n = A,T,C or G
acttctacacatctgcctaacttgggaatgaatgtgggagaaaatcgctgctgctgagatggactccagaagaagaaactgtttctccaggcgactttgaacccattttttggcagtgttcatattattaaactagtcaaaaatgctaaaataatttgggagaaaatattttttaagtagtgttatagtttcatgtttatcttttattatgttttgtgaagttgtgtcttttcactaattacctatactatgccaatatttccttatatctatccataacatttatactacatttgtaagagaatatgcacgtgaaacttaacactttataaggtaaaaatgaggtttccaagatttaataatctgatcaagttcttgttatttccaaatagaatggactcggtctgttaagggctaaggagaagaggaagataaggttaaaagttgttaatgaccaaacattctaaaagaaatgcaaaaaaaaagtttattttcaagccttcnaactatttaaggaaagcaaaatcatttcctaaatgcatatcatttgtgagaatttctcattaatatcctgaatca

SEQ ID NO: 3321 - DNA, 379 bp, Homo sapiens
gaaggattgccagactagttagaatagaatttaggattaggttagttttgaaaaatgatgttgtaatatatgggttctaacacatcctaccataaaaactggaggagatatgtgtaacctggttaatttgggatggtggacattttgggctaatactgacaaaatacatcttaggactagtatacatgtgacacggattgctaggaggaatgaaaaactaaactgtatagtttatattccgtaaaccattttataatgttcaaagattaggttttgttattgatagtattaaatacacagtttctcttaacagtgatgggtgaaaacattttaccggattatggaatgtttaccagaacatgttttgattcttgaatgt

SEQ ID NO: 3322 - DNA, 501 bp, Homo sapiens
acctgtgggtttattacctatgggtttatatcctcaaatacgacattctagtcaaagtcttggtaatataaccaatgttttcaaatgtattctgtcatacaaagagcagatttttattgaacttgtgcaataactatattaccatacaatataaatattcatgaatagtttcccaagtctggagcgaccacatagggagaaaatgtaaatgtctcaatttttgttcacaaaagtatattttatcaaattgctgtaagctgtggatagcttaaaagaaaaaaagtttcctgaaatctgggaaacaagacatttaaagaatcagcaaaatttcaaataaaaaattatgaaaatattatcctcattagttcatttagtcccatgaaattaattattttctctgcttgatcttggtggacagtttcatgaagctgtcagttagttcattaaagttttggaaattctcagacagtgcagtggtatcagaaacttgtattcaagagt

SEQ ID NO: 3323 - DNA, 497 bp, Homo sapiens
  misc_feature 465: n = A,T,C or G
acctgtgggtttattacctatgggtttatatcctcaaatacgacattctagtcaaagtcttggtaatataaccaatgttttcaaatgtattctgtcatacaaagagcagatttttattgaacttgtgcaataactatattaccatacaatataaatattcatgaatagtttcccaagtctggagcgaccacatagggagaaaatgtaaatgtctcaatttttgttcacaaaagtatattttatcaaattgctgtaagctgtggatagcttaaaagaaaaaaagtttcctgaaatctgggaaacaagacatttaaagaatcagcaaaatttcaaataaaaaattatgaaaatattatcctcattagttcatttagtcccatgaaattaattattttctctgcttgatcttggtggacagtttcatgaagctgtcagttagttcattaaagttttggaaattctcanacagtgcagtggtatcagaaacttgtattcaa

SEQ ID NO: 3324 - DNA, 516 bp, Homo sapiens
acacctttgactacagctgcagaagtgttcctttagacaaagttgtgacccattttactctggataagggcagaaacggttcacattccattatttgtaaagttacctgctgttagctttcattatttttgctacactcattttatttgtatttaaatgttttaggcaacctaagaacaaatgtaaaagtaaagatgcaggaaaaatgaattgcttggtattcattacttcatgtatatcaagcacagcagtaaaacaaaaacccatgtatttaacttttttttaggatttttgcttttgtgattttttttttttttttgatacttgcctaacatgcatgtgctgtaaaaatagttaacagggaaataacttgagatgatggctagctttgtttaatgtcttatgaaattttcatgaacaatccaagcataattgttaagaacacgtgtattaaattcatgtaagtggaataaaagttttatgaatggacttttcaactactttctctacagcttt

SEQ ID NO: 3325 - DNA, 502 bp, Homo sapiens
  misc_feature 357, 468: n = A,T,C or G
acttcagttggtgcacaaaatactgtcatttgctcaaagctggctgccaaatgtttggtgatgaaggcagaaatgaatggctcaaaacttgggagaagagcaaaacctgaaggggccctccagaacaatgatgggctttatgatcctgactgcgatgagagcgggctctttaaggccaagcagtgcaacggcacctccatgtgctggtgtgtgaacactgctggggtcagaagaacagacaaggacactgaaataacctgctctgagcgagtgagaacctactggatcatcattgaactaaaacacaaagcaagagaaaaaccttatgatagtaaaagtttgcggactgcacttcanaaggagatcacaacgcgttatcaactggatccaaaatttatcacgagtattttgtatgagaataatgttatcactattgatctggttcaaaattcttctcaaaaaactcanaatgatgtggacatagctgatgtggcttattatt

SEQ ID NO: 3326 - DNA, 617 bp, Homo sapiens
  misc_feature 471, 518, 549: n = A,T,C or G
actattacttgcctaggtgattaatttagcagtgattatccatgatgatatcatatttcaacagagccccatgaacataaaaaaggttagcgctgtctcagattttagcttggcaggaaagattaaaagccttttacaagtaaaacaataatttgaaagttagaggtgactgaataacagagaagcaatggtaaactgcaggttaaatttgagtaatgaataggtccttctaaaggggaaaaatcatcttgaatagaatacctctaaaattatatttaattttttggcttataatattgcatgagattaagtatatgttaaaaacaggctttgaactcttgtgtaataggtctttatacagccatgaaaacaaaacaaacatgcaaattaaatagaatcaacacttcagaaagctataaaattgaaattaccatgacatctgttttagatgatttttttttttttgcttangataagttgctgtcaaccactgactgttaaagcacaggattttttantctgacaagcctggtattctgagatcagggnattcttgctactttcctctgtttgaattactaggaaaccaccattatggctcccagtgctgtcatttg

SEQ ID NO: 3327 - DNA, 553 bp, Homo sapiens
  misc_feature 7, 54, 81, 184, 185, 444, 527: n = A,T,C or G
acattcngagcagagcacaagtatcaaagggacattggatatattttaataatngatctaacacaagcaaaaataaccacntgaaaatataaaactcaacaagagacataagaaaaaagcagacagaaaacaaaaaaaattcttattttagaatgatgctatatgtaacttgtaaaatatttanntttttatacatgagattatattggtttccttatttaaagaaaaaaattacaattaagaatggaaattaaaagtgtaaaaccaagataaatatttttggcttttggactaaaaaaaaaaagattagtgaggaaaaccaataaataatggggagagaaagaaatgctactaattttctcttcatgattaaaaaaaaaatcttttaaccatatttggggtgactggaaattaacagtgatgattttgagctaaaaaatcagngacacattttattaaaacaaaaggaacaaaggaactttaaccagaccatacatgtaaaggctgtttagcataacaatttcatnggattcaaaatatatctttaatgaca

SEQ ID NO: 3328 - DNA, 477 bp, Homo sapiens
  misc_feature 132: n = A,T,C or G
gaactctttaaggtaatcctttgggataaaggatcctgggaagttctctcaggtaaagaaagcttacagcagatttgtaatatatgtctggagagctatttataagaaatttaagaggattgttttgttttnctttattaaagatttaagcctttttactttgcaaaaagaaaactacaaaagttttatagatataactttgctaattttttaaacttttctgaaacgattagctgtagccaaattatgtggttacgttttgctacattagaatttgaaaatgcaatatgtgtggtaaatctactgtttgaaatttataatggtctctgatatgattcgaattttggtaacttttgaaagttattttccccctttagtcatggatttctatttgttttttaatgttaatttttctagaaagcatctgaattgactaggcttttcctatataaaaaactcaaaacttgttaactctgt

SEQ ID NO: 3329 - DNA, 279 bp, Homo sapiens
  misc_feature 235, 274: n = A,T,C or G
gctctgcggggtcactcccactttgttagtgatgtggttatctcctcagatggccagtttgccctctcaggctcctgggatggaaccctgcgcctctgggatctcacaacgggcaccaccacgaggcgatgggggggccataccaaggatgtgctgagtgtggccttctcctctgacaaccggcagattgtctctggatctcgagataaaaccatcaagctatggaataccctgngtgtgtgcaaatacactgtccaggatgagagccactcanagtgg

SEQ ID NO: 3330 - DNA, 306 bp, Homo sapiens
acttgtaatttctttctgcttagaatctaaagatgtgtttagaacctcttgtttaaaaataatagactgcttatcataaaatcacatctcacacatttgaggcagtggtcaaacaggtaaagcctatgatgtgtgtcattttaaagtgtcggaatttagcctctgaataccttctccattgggggaaagatattcttggaaccactcatgacatatcttagaaggtcattgacaatgtataaactaattgttggtttgatatttatgtaaatatcagtttaccatgctttaattttgcacattcgt

SEQ ID NO: 3331 - DNA, 501 bp, Homo sapiens
acctgtgggtttattacctatgggtttatatcctcaaatacgacattctagtcaaagtcttggtaatataaccaatgttttcaaatgtattctgtcatacaaagagcagatttttattgaacttgtgcaataactatattaccatacaatataaatattcatgaatagtttcccaagtctggagcgaccacatagggagaaaatgtaaatgcctcaatttttgttcacaaaagtatattttatcaaattgctgtaagctgtggatagcttaaaagaaaaaaagtttcctgaaatctgggaaacaagacatttaaagaatcagcaaaatttcaaataaaaaattatgaaaatattatcctcattagttcatttagtcccatgaaattaattattttctctgcttgatcttggtggacagtttcatgaagctgtcagttagttcattaaagttttggaaattctcagacagtgcagtggtatcagaaacttgtattcaagagt

SEQ ID NO: 3332 - DNA, 484 bp, Homo sapiens
  misc_feature 132, 442, 449: n = A,T,C or G
accagagagagttgttttaataacttatctataaactataacctctccttcatgacagcctccaccccacaacccaaaaggtttaagaaatagaattataactgtaaagatgtttatttcaggcattggatnggttttactttagaagcctgcataatgtttctggatttcatactgtaacattcaggaattcttggagaaaatgggtttattcactgaactctagtgcggtttactcactgctgcaaatactgtatattcaggacttgaaagaaatggtgaatgcctatggtggatccaaactgatccagtataagactactgaatctgctaccaaaacagttaatcagtgagtcgatgttctattttttgttttgtttcctcccctatctgtattcccaaaaattactttggggctaatttaacaagaactttaaattgngttttanttgtaaaaatggcagggggtggaattattactcta

SEQ ID NO: 3333 - DNA, 337 bp, Homo sapiens
accttccagctctaaaaaaatttgaaatagcataataaaagacaaaatgaaaatgaaattttaattgtaatattttctgtcacagcagcatatgtatatttgaaatactggtaacaattttaaggtagcattctgtggtattaatatttattaatatgctcatgaacttctaagtgccacaccagacatatagactctttactttaaaagagcatatatttaaggcattgaaatggatacagctatattcattctcaattgtcttaggctattatatggaaagatatgtgtcaattataggtaggtaggtaggtagattttctggaaacacagaagt

SEQ ID NO: 3334 - DNA, 203 bp, Homo sapiens
  misc_feature 8, 193: n = A,T,C or G
atgtgctngattagtgttgtctttgttggcactgacagtcttgcatggtcatatgccagtgtttttgctttagcttttctttgaataaaacagatttaaatgcatttagacaatacgtatttgtaagctgtttacatacactaaatttaagagattcaatattagagtttctttgtttctttaaacactacanagtgcaaatc

SEQ ID NO: 3335 - DNA, 384 bp, Homo sapiens
acattgtggagcaaattcctacatatgtagaatattctggacaaactgatgttctacggaaaggatattggccctcctacaatgttcctttccatgaaaaaatctacaactggagtggctatccactgttagttcagaagctgggcttggactactcttatgatttagctccacgagccaaaattttccggcgtgaccaagggaaagtgactgatacggcatccatgaaatatatcatgcgatacaacaattataagaaggatccttacagtagaggtgacccctgtaataccatctgctgccgtgaggacctgaactcacctaacccaagtcctggaggttgttatgacacaaaggtggcagatatctacctagcatctcagt

SEQ ID NO: 3336 - DNA, 557 bp, Homo sapiens
  misc_feature 537: n = A,T,C or G
acctattctggttctacatccccagtgagggcaaaaatcatatctgaagatgatgtgcttcttggtcattttctattcctgagttcaaagagacataggagaataattttctttaaagtaaatccaatcaatcttctccttctaattagaccaataatatccacatgaaatgataaatgatcatcttaaacaaggcactagcaactttttctaggaaattaaactaccgcacttacagagagggaagaaaatgatgctctcattttagcaacatgataaaatagttccgatttttcagagtccagattttgctctcagcttgtatttatcaaacatttgaatcattttattactgccattcatctaacatttggaatatttggcattaaattgccaaaaggctgagaaagaacaagatcacatttcaactactggccccagattttagagcaaatatgaaggggtggaataaattttcttgcttgattgacaggtttaagaaacacaaaagagtgattttctctttcctctttccanatctgaaagtgcccttgact

SEQ ID NO: 3337 - DNA, 536 bp, Homo sapiens
acctctcctccagtttctcagccattcagactgacttgccctattttgtgaacaaaggcagattagcattaaaggtatagtcattggtcaagaaacagaactgatgggccaggtgtggttgcacacacttgtaatctcagcactgtgggaggccaaggtggatggattacttgagcccaggagttcaagaccagcttgggcatctgaggccagcctgagcaacatgacaagatcctgtatctataaaaaatacaagaattagctgggtgtggtagcatgcccttgtagttccagctactctggaggctgaggtgggaggattacttgggcctgggtggttgaggctacagtgagccatgatcatgccactgcactccagcctgggaaacagagtgagaccctgtctgtctgtctgtctgtctctctctctctctctctctctctcacacacacacacacacacacacaaagaagaaacagaactgatggcaggtctagattggctctggcatagggcaagcctatctagttttctt

SEQ ID NO: 3338 - DNA, 445 bp, Homo sapiens
  misc_feature 53, 70, 123, 134, 143, 372, 379, 383, 409, 419, 423, 427,444: n = A,T,C or G
cgagcttttttttttttttttttttttttttttttttattttacaaagagcanatttttattgaacttgngcaataactatattaccatacaatataaatattcatgaatagtttcccaagtntggagcgacgncataggganaaaatgtaaatgtctcaatttttgttcacaaaagtatattttatcaaattgctgtaagctgtggatagcttaaaagaaaaaaagtttcctgaaatctgggaaacaagacatttaaagaatcagcaaaatttcaaataaaaaattatgaaaatattatcctcattagttcatttagtcccatgaaattaattattttctctgcttgatcttgggggacagtttcatgaanctgtcanttanttcattaaagttttggaaattctcanacagtgcagnggtntcanaaacttgtattcaaaant

SEQ ID NO: 3339 - DNA, 452 bp, Homo sapiens
  misc_feature 262: n = A,T,C or G
actttatatagtatagctttgggccatgtagcattttaagactcaattttaaaaaattattaatctgttgctgactcttaattcctatttcaatatgtgtttccttgaagaattcaggatacaacttcttgtgtatgacagctttccttcacacactatttttgtgggtgtgtatatatctgatttgggaagaatttaaaaaacacatagctttttaatttgtttgaaacagactttctgcctgttacatttttgcttttanccaattaaagaagccaatggcattttagttttatattgtgttttccactagtatatccctgttgatttgtttgtgccttttattaactgccattttctaaaatttttttcaataaaaggaaggaagatgtgaaaaaaatggagtcatagttttgatggagagaacagagaaacaagtgttaacatctttc

SEQ ID NO: 3340 - DNA, 376 bp, Homo sapiens
actctataaaaaaagatctgaaattcaaacatctgataaggccacaatgaagagatttccagcagtgggtgttgcaggatgctggcacccaaatcgccgcaggcttgcaaaggtgctatgcaaggtgaggaggcaggtgaggcaggcagtgcctctcacaggtccatgtctgggcctcctgaggatgtcttcagcggcactgagtcaaatccatcaggagtcctcttggaggtaaatgatttgatcttcccaaagagtgacttcttgctggtaaagatgaggtcgtcctctacatcctcgccttccatgatggcgcagctgtcagctgctggcaggtcacagtccttgagagtagcattcatcaccagcttggagt

SEQ ID NO: 3341 - DNA, 542 bp, Homo sapiens
attaaatcctttgaagctcctgcaaccatcaattctgcatctcttcatcctgagaaagaatttcttgttgcaggcggtgaagattttaaactttataagtatgattataatagtggagaagaattagaatcctacaagggacactttggtcctattcactgtgtgagatttagtcctgatggagaactctatgccagtggttcagaagatggaacattgagactatggcaaactgtggtaggaaaaacgtatggcctttggaaatgtgtgcttcctgaagaagatagtggtgagctggcaaagccaaagattggttttccagagacaacagaagaggagctagaagaaattgcttcagagaattcagattgcatctttccttcagctcctgatgttaaggcctgagcgtcaatcatatgttgcagttagtatacaactgactaaaacaagcaagcagagaaaagcatcagccttccagagttactgtctgcttaaggcagaaacagcagtaaataatgaggaaaatgaattagctccagtgc

SEQ ID NO: 3342 - DNA, 558 bp, Homo sapiens
aagcttgcggccgcaaaccttttttttttttttttttgctttcaagtttattaaagaagatcactaaagatattgactagagaatgctgtgtgctatttcaattacatttgtttttcttttattaacaggaattttgattcttcaaggaagtggctcaatttcaatttcaggtgaccaggtttatcgtgacttttccttcttgtttacttttcgctaggaaggggagttgtaggggcagattcaggtattggaataggaaaattacgtctaaaccatggaaatcttggaaatggaattggtggaagtgggcgaaatggatatgggtaagggaacacaaaaaaccctgaagctaattcatcgctgtcactgatacttcttttttctcgttcctggtcttgagagactgggaaaccaacagccactgccaagatggctgtgatcaggaggagaactttcttcatctcaaacgtttcagtcagttctttctctctgacgctgcctcgtgccgaattcttggcctcgagggccaaattccctatagtgagtcgtattaaatt

SEQ ID NO: 3343 - DNA, 162 bp, Homo sapiens
  misc_feature 4, 35, 50, 56, 95, 134: n = A,T,C or G
acanaactcataggaaaaaagaaattaaattttanctttctggagagcancccctntctggcaccatcaaacacttctttgtttcccttcaactnggaactcttcaaacatcaggggttgtgagggtttggccnttcttttatcttgggtccatgtgagtga

SEQ ID NO: 3344 - DNA, 527 bp, Homo sapiens
acccccgacagaaaatatgttacgctaagagaaagttagcaggtgccaatccagcagtcattacttgtgatgagctactcctgggtcatgagaaggcccctgccttcagagactatgtggctgtggcacgaggaagcaaagatcacaacattcgtgcccaagaaccagagagtgggctttcagaagagactcaagtgaagtgcctgatggaccaggcaacagaccccaacatccttggcagaacctgggaaggatgggagccctggatgtgaggtctgtgggagtctgcagatagaaagcattacattgtttaaagaatctactatactttggttggcagcattccatgagctgattttcctgaaacactaaagagaaatgtcttttgtgctacagtttcgtagcatgagtttaaatcaagattatgatgagtaaatgtgtatgggttaaatcaaagataaggttatagtaacatcaaagattaggtgaggtttatagaaagatagatatccaggcttaccaaagta

SEQ ID NO: 3345 - DNA, 576 bp, Homo sapiens
accactccagttgtcttcacaatttaatgctacagaaacctaaatgtttctacttcagctacgaaatcattcaattggcaggcaaaacattttttattacctatttataaaaacatgagaaagggaggaaaaataatagaatgtataaactcatgctatcataattctaatgtctagctataaaggcatatggttgtaacaattgctatctaaaattttttattagctgcagtagctgcattccattttcattaccattttttaaagtctttttgcttggtcatctaaagacgtttttcaaatttcaaaagatcagctattattgtcctccttgtgcccctaaggaattaataaaatgcacattcatttccttctttctaaatgttccagttaaaaacgaaacaatgcaaaaatggcaaacattttcttggaccatttttttcactgtaacaacaaaaaatgtgcaaggtaaatagaactcaagttttgttttattttttgtctgtttgtattttaataagtccgtccagaataatacaggttacatagctgtaaccatcttaaggaaaatgacat

SEQ ID NO: 3346 - DNA, 494 bp, Homo sapiens; identical to SEQ ID NO: 3169

SEQ ID NO: 3347 - DNA, 434 bp, Homo sapiens
acacatcctcttcaagtccctgaacttcatcctggccaggtgccctgaggctggcctagcagcccaagtgatctcacccctcctcacccctaaagctatcaacctgctacagtcctgtctaagcccacctgagagtaacctttggatggggttgggcccagcctggaccactagccgggccgactggacaggcgatgagcccctgccctaccaacccacattctcggatgactggcaacttccagagccctccagccaagcacccttaggataccaggaccttgtttcccttcggcggggaagtcataggttagggagcacctcacactttcctcaggagaagacacacaaccatgaccctcagcctggggaccccaactccaggccctccagccccaaacctgcccagccagccctgaaaatgcaagtcttgt

SEQ ID NO: 3348 - DNA, 332 bp, Homo sapiens; identical to SEQ ID NO: 3037

SEQ ID NO: 3349 - DNA, 241 bp, Homo sapiens
actacagtaattatatcaggaatagacaatttcctacactgtcaaatatataaaagttccttttgcactttcttcaacactgatcaacaagcagattcagtccacatttgctttgatctaactactgagttaacccaagcttcttcttcagagactctggcatctcgggtggaggagggcgaggaagtctgaagtagaccttcacggagtcatagataaaccactgtagtgcagtcagggt

SEQ ID NO: 3350 - DNA, 441 bp, Homo sapiens
acagtgagaaactttgaagttagactttagattagagtttatatattttctttgcaggaaaatttggcttccaataaaattcatatatgaaacactcatgtattttcagtgttctggaaatcatggcagtggtttaagattaaacagacttttctcattgttttagacaagccaaagaggagagagatttatttattgtggaaaaattttaaaatagaaatttagaataatgataatgacattattgatatttaaaagtcagctatcgacacatgtatttttctctatcaattctttatagctaataatttaaagtttttaccatgaaatgaagaaacagcctgtatgataataactcagatgattaaggaataagttatattttcatattgtgatgtaataagtttatctgaaccacaatgtactttttatacctgatgt

SEQ ID NO: 3351 - DNA, 307 bp, Homo sapiens; identical to SEQ ID NO: 3048

SEQ ID NO: 3352 - DNA, 449 bp, Homo sapiens
  misc_feature 258, 428: n = A,T,C or G
ggaattctgaattaagcacagagttgaagtttatacccgtttcacatgcttttcaagaatgtcgcaattactaagaagcagataatggcgttttttagaaacctaattgaagtatattcaaccaaatactttaatgtataaaataaatattatacaatatacttgtatagcagtttctgcttcacatttgattttttcaaatttaatatttatattagagatctatatatgtataaatatgtattttgtcaaatttgntacttaaatatatagagaccagttttctctggaagtttgtttaaatgacagaagcgtatatgaattcaagaaaattaagctgcaaaaatgtatttgctataaaatgagaagtctcactgatagaggttctttattgctcattttttaaaaaatggactcttgaaatctgntaaaataaaattgtacctgcc

SEQ ID NO: 3353 - DNA, 534 bp, Homo sapiens
accatttgcctcccgggctcaagcgattctcctgcctcagcctcccaagtagctgggattacaggcacctgccaccatgcccggctaatttttgtaattttagtagagacagggtttcaccatgttgcccaggctggtttcgaactcctgacctcaggtgatccacccgcctcggcctcccaaagtgctgggattacaggcttgagcccccgcgcccagccatcaaaatgctttttatttctgcatatgttgaatactttttacaatttaaaaaaatgatctgttttgaaggcaaaattgcaaatcttgaaattaagaaggcaaaaatgtaaaggagtcaaaactataaatcaagtatttgggaagtgaagactggaagctaatttgcattaaattcacaaacttttatactctttctgtatatacattttttttctttaaaaaacaactatggatcagaatagccacatttagaacactttttgttatcagtcaatatttttagatagttagaacctggtcctaagcctaaag

SEQ ID NO: 3354 - DNA, 509 bp, Homo sapiens
  misc_feature 493: n = A,T,C or G
tgcttttgtaatgaaaatggagagaatgaagagcgctgtgccagtaaatactccccttcacctttctaattattaacttgttttcatggagtggctattcagcattggcagttaccacattctgttcaatttaaccaaactggcttttttttttttttagtgaagttaaacaaacattgggataccgacacagacaacttgagacagtttttttaatcttttaatcagtgtagctatgtgctgctactgctcaagagctggatccatacaggttgtgtgtcatctgtcctcttgaggttcaggagattctaaattgaatattccacggtttgggacaacatccggaagttttccctatgactttatattttgcattatgtcaaatgttatggcagggcccaaatagcatagccacaagtttggtttatgtgggcataaaattctaaccaaaccccagacatagggagtcatctggagaaagcctgtatgtggngttttaacctaataaa

SEQ ID NO: 3355 - DNA, 523 bp, Homo sapiens
ggcacagctaattctactcacagtgcttttaagtgaaaatggtcgagaaagaggcaccaggaagccgtcctggcgcctggcagtccgtgggacgggatggttctggctgtttgagattctcaaaggagcgagcatgtcgtggacacacacagactatttttagattttcttttgccttttgcaaccaggaacagcaaatgcaaaaactctttgagagggtaggagggtgggaaggaaacaaccatgtcatttcagaagttagtttgtatatattattataatcttataattgttctcagaatcccttaacagttgtatttaacagaaattgtatattgtaatttaaaataattatataactgtatttgaaataagaattcagacatctgaggttttatttcatttttcaatagcacatatggaattttgcaaagatttaatctgccaagggccgactaagagaagttgtaaagtatgtattatttacatttaatagacttacagggataaggcctgtgggggg

SEQ ID NO: 3356 - DNA, 295 bp, Homo sapiens
gcgtattgagccagtggtgctaaatgctacatactccaactgaaatgttaaggaagaagatagatccaattaaaaaaaattaaaaccaatttaaaaaaaaaaagaacacaggagattccagtctacttgagttagcataatacagaagtcccctctactttaacttttacaaaaaagtaacctgaactaatctgatgttaaccaatgtatttatttctgtggttctgtttccttgttccaatttgacaaaacccactgttcttgtattgtattgcccagggggagctatcactgt

SEQ ID NO: 3357 - DNA, 503 bp, Homo sapiens
caggtacccattataattactaaactgtgaagtcactattatttgtatctgaccagctatacaaaactcatcaatttttcttttgaaaaaaggtagtaaaaatcgcaaacgataaagaagacactactcattaaaagtcatgtttactaatctagcaccataattccagtcttagaacctcccatgcagttggaaagggattatgggaagaggtgagtatgttggaaatgtcgggtagttctcaaattggggccccattttgcttgctttaaagcaaaaaacacagggtctagcaaagaagagaagtgctgaggctggagacgaaaacaaaagcttttggttcagatagtaaacgaggccctcaagagcagtagaatcagtatatcctgaaggcagtgctggaggcagtctcatgcactagggggtttcttcttggcatccaagtcctttttaatttcttcaagttttttagccaggtttggtatatcatagttctgagccag

SEQ ID NO: 3358 - DNA, 477 bp, Homo sapiens
  misc_feature 459: n = A,T,C or G
gcacggaggaaccaggagcgtgccctgcgcaccgtctggagctccggagatgacaaggagcagctggtgaagaacacatatgtcctgtgaccgccctgtcgccaagaggactggggaagggaggggagactatgtgtgagctttttttaaatagagggattgactcggatttgagtgatcattagggctgaggtctgtttctctgggaggtaggacggctgctccctggtctggcagggatgggtttgctttggaaatcctctaggaggctcctcctcgcatggcctgcagtctggcagcagccccgagttgtttcctcgctgatcgatttctttcctccaggtagagttttctttgcttatgttgaattccattgcctcttttctcatcacagaagtgatgttggaatcgtttcttttgtttgtctgatttatggtttttttaagtataaacaaaagnttttttattagcattctg

SEQ ID NO: 3359 - DNA, 528 bp, Homo sapiens
acttcagttggtgcacaaaatactgtcatttgctcaaagctggctgccaaatgtttggtgatgaaggcagaaatgaatggctcaaaacttgggagaagagcaaaacctgaaggggccctccagaacaatgatgggctttatgatcctgactgcgatgagagcgggctctttaaggccaagcagtgcaacggcacctccatgtgctggtgtgtgaacactgctggggtcagaagaacagacaaggacactgaaataacctgctctgagcgagtgagaacctactggatcatcattgaactaaaacacaaagcaagagaaaaaccttatgatagtaaaagtttgcggactgcacttcagaaggagatcacaacgcgttatcaactggatccaaaatttatcacgagtattttgtatgagaataatgttatcactattgatctggttcaaaattcttctcaaaaaactcagaatgatgtggacatagctgatgtggcttattattttgaaaaagatgttaaaggtgaatcc

SEQ ID NO: 3360 - DNA, 448 bp, Homo sapiens
acccaacaataccaccgaccaggagctgcaacacattcgcaacagcctcccagacacagtgcagattaggcgggtggaggagcggctctcagccttgggcaatgtcaccacctgcaatgactacgtggccttggtccacccagacttggacagggagacagaagaaattctggcagatgtgctcaaggtggaagtcttcagacagacagtggccgaccaggtgctagtaggaagctactgtgtcttcagcaatcagggagggctggtgcatcccaagacttcaattgaagaccaggatgagctgtcctctcttcttcaagtcccccttgtggcggggactgtgaaccgaggcagtgaggtgattgctgctgggatggtggtgaatgactggtgtgccttctgtggcctggacacaaccagcacagagctgtcagtggtggagagtgtc

SEQ ID NO: 3361 - DNA, 322 bp, Homo sapiens
acctgggatttatgcctcagagcaagacatcatttgagtaatttcaaatgatacacagctccttcatgtaaaaaagatgttttgtggtcacaattacttcaaaaagtaattatattcaaataacctgacatatcatgccttagcaattacaaaaccatgattttgacacatggcaatttttaagttaggcaaatgtaaaatgctaaaagatgtgaacagctgttcttctgtttaagttagagcactgcaaaactcaggtaatgactttatttttttcagttagcataaccagcccacgatacagcatactaaatcacaaagt

SEQ ID NO: 3362 - DNA, 296 bp, Homo sapiens
actcccctccttgaactaggattgtagtcccaaagaggctactgtaaggcaatcatggtgctcagagcagtgtttcgtgtgtgttttaaactggtaggaaactaggtgcatatttataaaaataaaaaacactgggagaaatgaaaaaatatatatcaaatatattcagcctggcttcaaattgtaagcatgcacaaattctgtctctggattatattatgaagcttttatgtgaaacatgtttctttgtagtgaaaaccacattggagatgtttagtaatcatattgttactggt

SEQ ID NO: 3363 - DNA, 271 bp, Homo sapiens
actgttgttaggcagctctgtagttgctaatttaaccaataagtcaatttgctattcatgaagaaacgattctgagaatcctgtcaggaattggggaatgaaaaaatacacaaaataatggtctttgtcccagtagagttcatagtctatttagtgtgcatgtttttccttaatgatgtatttgatctgacttttttccttctcaaaagaatcatacttgggattacaggtaccttttaatttgctcctggggctaagaggaaggaatggt

SEQ ID NO: 3364 - DNA, 481 bp, Homo sapiens
actggctcctctgtggtgtctgcctgttgcgtgacactctccttgcagttcttgagttgcggcagaacatcgcgatgggaaccgatggtgggtggggctgcagagtgccccatcggtcaccttgtttctcaactacctcgcatcattgcagatgctagcgcgttgcctgtcgctttcccttggatacctagaccgttataaagtgtgccacatggacttaccgagcatggagagaggattttagctaggatttgaacacttggtgctgggaacctcagggtattgcttgccactaagccatgaaaccagagacaaaatctctatactgccctgagttggggggaattctcagtgccaactgtggctggtcctcattcaaagggacggtcagtttggtgtcaacatgaaacaccaagatgtctgtctctgaagcgtgattttaaaatccccatgcctgtggctgcgcttcctatttctaggg

SEQ ID NO: 3365 - DNA, 530 bp, Homo sapiens
  misc_feature 453, 497, 517: n = A,T,C or G
ctttttgttcttagtctttttcttgtaaaattgatgttctttaaaatcgttaatgtataacagggcttatgtttcagtttgtttcccgttctgttttaaacagaaaataaaaggagtgtaagctccttttctcatttcaaagttgctaccagtgtatgcagtaattagaacaaagaagaaacattcagtagaacattttattgcctagttgacaacattgcttgaatgctggtggttcctatccctttgacactacacaattttctaatatgtgttaatgctatgtgacaaaacgccctgattcctagtgccaaaggttcaacttaatgtatatacctgaaaacccatgcatttgtgctctttttttttttttatggtgcttgaagtaaaacagcccatcctctgcaagtccatctatgttgttcttaggcattctatctttgctcaaattgntgaaggatggtgatttgtttcatggtttttgtatttgagtctantgcacgttctaacatgatanaagcaatgcatta

SEQ ID NO: 3366 - DNA, 169 bp, Homo sapiens
acttccagaggaaagccaagctgcttctgttgtgagcgaatcagccaagagcctgaggctgaagggaaaagtttttgtacaagctttttttttttttttttttttttttttttcttttttttcttttttttttttttttttttttttttttttcttttttttttttttt

SEQ ID NO: 3367 - DNA, 402 bp, Homo sapiens
acaacacaaacttctcccgtcagatgcaactagtctagcatccaaacatcatgcacaacacctcagtggcagcagcgcactgcgcccactcccaccgcggccctgctcatttgtgcatgatatttggagcatctggaggagtgggaatagtattgggaagaggagggaggaggaaacagcgtgagtgcctagctgagaggaggtcagccaaagttgtgcagggcgagcctgaacatgtcattggtgcaaacccaagcatcgttgatgttctttaataggaacatctggtggaaccccatgatggggtcttcatccgccttaagctggcccacaaccatgctgatgatgcagctatctggagtgggctgatggtcctgcgcggtgatgctgtgctgaattttc

SEQ ID NO: 3368 - DNA, 536 bp, Homo sapiens
actggaagccctagtcagagcaattagatgaaagaaagaaaaattatcttgaatgtagtattcaatgattttttatgatcaaggtgaaataaacagtctaaagaagaggtgtttttataatatccatatagaaatctagaatttttacttagatactaataaaatacatttagaaacttttaaagtcatgaaaaagcattaaccttctaaacagtatattctaaaaagtcaaaacgttaacaatagtttttatctaataaaagcactgcaagaaaatagggtagaattgttacagctggacttgtaaaaatatgtctttttactcagggtttaaaatgtcccatttaaatatgaaatgtaaacaaatttgttttttaaggttaaggccaaatgtaacaataaaaccctgtcgatggttttagctaaattagaggaagttgtatgagacttaatgatctaaaaacttaaaattgaattggtttgattaaaaataaagcttgcaattttaaaagtagctcacatttaatttcttgtgt

SEQ ID NO: 3369 - DNA, 342 bp, Homo sapiens
acatcgaagagtatatgggttatacaatccacactctgaaactaaaggagactcattccaaaatgcttggttttgggttgggggtttgagaggggggctggtgctgggagggtaattttctcctaatacagaatatggaaatatttagatgagaagcagaatgactaaaatatcagtgatccatttaatttttatctccaagaatagaaaactgtattataggcttccaaaattaaagaattgatcaaaaatcgaaacacagaagagaagaaacaaatcctaagttcgatttgtgctattgttacaactgattagcacttcagacgcactgcatccaagtgt

SEQ ID NO: 3370 - DNA, 363 bp, Homo sapiens
actatattcaaatcaaagggtctttattacaaaaaagagcttaataatgctatttacaacatattgctaaataatataaaggcagtgttttgtcacggtttatactatatacatatgagaaatggctgggacaatattgagggaagccatgacctttgattcttctaggtagcgctgagaccaatcccaaatacatttttttcttagttctaaatttgaagtcgtaatatacaattttaaaatattttctccccatttttaggggaattgaatatttaaaaaaatacagaatgaatacgttttcacaaaagaaggtaagcttgtttgccttttctgcttatgtttgtgcattctgagggggtg

SEQ ID NO: 3371 - DNA, 530 bp, Homo sapiens
acagtattttgaatgtgagatgattgtcaggactaactgtctttttaacaaaacattttcagtattttaaataaaattttgtaaagtaatgtgaattaaaaattttggaacaattagaattcattcactattgtatagaagatgctgttaaaacataggaagggtatttttcttgatccaaagtttgtgaatttggctttgctacctcaattgcaggtgtttgtttgcctttataaactgttgcaaatagaaaaaaaatagaataagtatatatttttggagtaacatcaatatttaaacatttttacacagatcggtgtttgaaaatttgccatttcaggctaatatttttatatatttttgactttttaaaagttcatcagtgtttttgctactgttaagcttatgcagtttatactgtattttttatgtatcctttatatttaccaaacctgactccctgtaaaggagtgctgtcttaaaaacaactgaaggggttaaagtcgtttcttttagtttaatagatgtgc

SEQ ID NO: 3372 - DNA, 295 bp, Homo sapiens
acagtctaaacaggaggcgaacactgtcatccggacaggctgagaggaggcggggaaaggggctcgaaggagcctgggcagaccctgctggggaggggcctggactacaaccacctgctcccagaaatgacactgcctgaggcaggagacacagcaaaagccaactatgggaaatctgagcattagaggagactggcccctttctctaagacggcctcaggtaggaaaagggcagccattacaagaagaagagtcgtcaggtttggaaattgtatattaagcccttcactgaagt

SEQ ID NO: 3373 - DNA, 583 bp, Homo sapiens
  misc_feature 534: n = A,T,C or G
aaaagaattccttcttaaaatcaaaaacaaaacaaaaaaacacattctaaatactagagataactttacttaaattcttcattttagcagtgatgatatgcataagtgctgtaaggcttgtaactggggaaatattccacctgataatagcccagattctactgtattcccaaaaggcaatattaaggtagacagatgattagtagtatattgttacacactattttggaattagagaacatacagaaggaatttaggggcttaaacattacgactgaatgcactttagtataaagggcacagtttgtatatttttaaatgaataccaatttaattttttagtatttacctgttaagagattatttagtctttaaattttttaggttaattttcttgctgtgatatatatgaggaatttactactttatgtcctgctctctaaactacatcctgaactcgacgtcctgaggtataatacaacagagtactttttgaggcaattgaaaaaccaacctacactcttcggtgcttanagagatctgctgtctcccaataagcttttgtatctgccagtgaatttac

SEQ ID NO: 3374 - DNA, 83 bp, Homo sapiens
acatccataatcagccaccatttaacccttccttgttctaaaacaaaaaccaaagggcgctggttggtagggtgagctcgggg

SEQ ID NO: 3375 - DNA, 517 bp, Homo sapiens
acatacttaaggcccagtggaattgtggaccacaaggctggaaagtggtgcggggaaaaatcacggtcataatgaaatgctagctcaagggctctgaactccaccatcaggcaatggtgagccactgtaggttttctgagatgggccatagtcagagctatgcttcgggaagatcacgatggcaataatgcatcacaaggatggagggggtgagaatagcttaaaggtaggaaaagcagttagaaggtcactggtaatagcagttgaggcttaattagtcagaatggaaaagaggatatggacatgagagatatcttagaggtgagaatgacagaactcggcaatcaccgtatttcataatgcatcaagtaggctgaccatatatcctggtttgcctgggatatgttttcctgatgtaattactaatggcacccttttactctcgaaaaggtttggacaataaactatataatcatattaattaggagcaattagtaaacagaatcaaaggtgactc

SEQ ID NO: 3376 - DNA, 463 bp, Homo sapiens
cagcgtggtcgcgccgaggtcatcaacattcttcaagtatctgaaatactattaattagcacctttgtattatgaacaaaacaaaacaaggacctcagttcatctctgtctaggtcagcacctaacaatgtggatcacactcatgggaaagtgttttgaggtagtttaaacctttggaagtttgggttttaaacttccctctgtggaagatattcaaaagccacaagtggtgcaaatgtttatggtttttatttttcaatttttattttggttttcttacaaaggttgacattttccatagcaggtgtaagagtgttgaaaaaaaaattcaaatttttgggggagcgggggaaggagttaatgaaactgtattgcacaatgctctgatcaatccttctttttctcttttgcccacaatttaagcaagtagatgtgcagaagaaatggaaggattcagctttca

SEQ ID NO: 3377 - DNA, 522 bp, Homo sapiens
acttcagttggtgcacaaaatactgtcatttgctcaaagctggctgccaaatgtttggtgatgaaggcagaaatgaatggctcaaaacttgggagaagagcaaaacctgaaggggccctccagaacaatgatgggctttatgatcctgactgcgatgagagcgggctctttaaggccaagcagtgcaacggcacctccatgtgctggtgtgtgaacactgctggggtcagaagaacagacaaggacactgaaataacctgctctgagcgagtgagaacctactggatcatcattgaactaaaacacaaagcaagagaaaaaccttatgatagtaaaagtttgcggactgcacttcagaaggagatcacaacgcgttatcaactggatccaaaatttatcacgagtattttgtatgagaataatgttatcactattgatctggttcaaaattcttctcaaaaaactcagaatgatgtggacatagctgatgtggcttattattttgaaaaagatgttaaaggt

SEQ ID NO: 3378 - DNA, 327 bp, Homo sapiens; identical to SEQ ID NO: 3034

SEQ ID NO: 3379 - DNA, 539 bp, Homo sapiens
actatgtcatatgttagtttcaaaccaagttaatgtcataaactggcaggcactgcatcttgtcaattattagccagttcattattaacattactgagtgaatatcatatatggtataattcattacagtgtaaatagccatttatatcctggggaattcctcaccaagactatatggaatatttttgatcagtggaggagacacattaagtagctttatcccattgcccttaactcttatattgttcattttattaaaggtatcatgcaatgagagttagcaatataatcactgcaaaaattatccttagaggaaaacgtaatctactttttatgaactggaataacaaaatattaagcagaatcacttgttacaaaaaaagcatcacaatcctatcatttgagatataagtttccatctaacatcactgagagctgtgactaattcagtctctatggcaaggtaaaatttttaatacattctaaagtttgcaatgttaactatattttcacacaggttgaagtagacatatttcatg

SEQ ID NO: 3380 - DNA, 380 bp, Homo sapiens
actctgctatggtgctggcttcctttaaactcaggatagatgccaggtgggctccgtttccgtaagactgacactcgagctcggcatcagaccagttcctcagcttcctgaagtaaccatagcaattggacttgtggtaaaaccatccaggagcacagctgggtctcatgatgatatcacccaggactcctgttttggccaggcagctcagcaataggagcagccgcatgcttctggaagccatcttcctcctaccctgaggatgtagctagtgcaaggatctcagagaccttactagcgcttctttgaaactcctgggttctccttgatctgcaaatctgtttggcaaccaagactctaagggcccctgccttcttcag

SEQ ID NO: 3381 - DNA, 466 bp, Homo sapiens
gtggacatagttgatgtggcttattattttgaaaaagatgttaaaggtgaatccttgtttcattctaagaaaatggacctgacagtaaatggggaacaactggatctggatcctggtcaaactttaatttattatgttgatgaaaaagcacctgaattctcaatgcagggtctaaaagctggtgttattgctgttattgtggttgtggtgatagcagttgttgctggaattgttgtgctggttatttccagaaagaagagaatggcaaagtatgagaaggctgagataaaggagatgggtgagatgcatagggaactcaatgcataactatataatttgaagattatagaagaagggaaatagcaaatggacacaaattacaaatgtgtgtgcgtgggacgaagacatctttgaaggtcatgagtttgttagtttaacatcatatatttgtaatagtgaaacctgt

SEQ ID NO: 3382 - DNA, 411 bp, Homo sapiens
acggccagggctattggttgaatgagtaggctgatggtttcgataataactagtatggggataaggggtgtaggtgtgccttgtggtaagaagtgggctagggcatttttaatcttagagcgaaagcctataatcactgcgcccgctcataaggggatggtcatggctaggtttatagatagttgggtggttggtgtaaatgagtgaggcaggagtccgaggaggttagttgtggcaataaaaatgattaaggatactagtataagagatcaggttcgtcctttagtgttgtgtatggttatcatttgttttgaggttagtttgattagtcattgttgggtggtgattagtcggttgttgatgagatatttggaggtggggatcaatagagggggaaatagaatgatcagt

SEQ ID NO: 3383 - DNA, 426 bp, Homo sapiens
ttttaccagacactaaagcatatggagatagaatagaaagaatgcttcgcctcagtttgaacattgaccctgatgcaaaggtggaagaagagcccgaagaagaacctgaagagacagcagaagacacaacagaagacacagagcaagacgaagatgaagaaatggatgtgggaacagatgaagaagaagaaacagcaaaggaatctacagctgaaaaagatgaattgtaaattatactctcaccatttggatcctgtgtggagagggaatgtgaaatttacatcatttctttttgggagagacttgttttggatgccccctaatccccttctcccctgcactgtaaaatgtgggattatgggtcacaggaaaaagtgggttttttagttgaattttttttaacattcctcatgaatgtaaatttgt

SEQ ID NO: 3384 - DNA, 509 bp, Homo sapiens
attaaatcctttgaagctcctgcaaccatcaattctgcatctcttcatcctgagaaagaatttcttgttgcaggcggtgaagattttaaactttataagtatgattataatagtggagaagaattagaatcctacaagggacactttggtcctattcactgtgtgagatttagtcctgatggagaactctatgccagtggttcagaagatggaacattgagactatggcaaactgtggtaggaaaaacgtatggcctttggaaatgtgtgcttcctgaagaagatagtggtgagctggcaaagccaaagattggttttccagagacaacagaagaggagctagaagaaattgcttcagagaattcagattgcatctttccttcagctcctgatgttaaggcctgagcgtcaatcatatgttgcagttagtatacaactgactaaaacaagcaagcagagaaaagcatcagccttccagagttactgtctgcttaaggcagaaacagcag

SEQ ID NO: 3385 - DNA, 550 bp, Homo sapiens
  misc_feature 548: n = A,T,C or G
atttcctattgactacccctattcaccacctaccttcagattcttgaccaaaatgtggcaccccaacatttatgagaatggagatgtatgcatttcgattcttcatccgcctgtagatgacccacagagtggagaactgccttctgaaaggtggaatcctactcagaatgtgaggactatcctattaagtgtaatctcactgcttaatgagcccaacaccttctccccagccaatgtcgatgcttcagttatgttcaggaaatggagagacagtaaaggaaaagacaaagaatatgctgaaattattaggaaacaagtttcagccactaaggccgaagcagaaaaggatggagtgaaggtccccacaaccctggcggaatactgcatcaaaactaaagtgccttccaatgacaacagctcagatttgctttacgacgacttgtatgatgacgacattgatgatgaagatgaggaggaggaagatgccgactgttatgatgatgatgattctgggaatgaggagtcgtgacgtgctccttcagtgcccngt

SEQ ID NO: 3386 - DNA, 524 bp, Homo sapiens
acttcttcctgggtaagcagttatgaccagagatggaaccggcaactctttggccagaaagctgtatccaaaagacagagaagatgagaaacagggagggcaaaggcgaaaaagcaattggacatgatagctagatttgtttcaggaaaacatcctgctttccaaggatttagatgaatgtttttgttcactggtgactcaggtaacacgtcttcaagaagccatagggaggttgagggagggaagtcaagaaggggggttgaggactgcacttttgatttacttctgacttcacgagtcactttctgccaaagaaatctctccttttgcttctagcaccgactagatttccttcagctgatgattgactcccagaattcgaaagaaactgagtcccacaaagctctgtctgatctggagctcgcagcccagtcaataatcttcatttttgctggctatgaaaccaccagcagtgttctttccttcactttatatgaactggccactcaccctgatgtccagca

SEQ ID NO: 3387 - DNA, 360 bp, Homo sapiens
acagatcattattttccagaaaaagtgacccatgaagttggctggggcgggtgtggagtgttatgtcatgggacggaccttgggatgagggcgttaatccatgggcccctctgagatcactttaaacattttggtaagactgcccaggctgatgaagggctggagcgtgtgttaaaaacaagggctagtgttggttaaaagggatctttggcaagtgggaaactgctcgccactgcagaatttcttcagaccaaggaagggactgaaacggacttggaaaactaaagcaaaaccatgactgccgggatggtctcgtgtggtgattctgcaagaaataatcaccagagcgaggggacaggt

SEQ ID NO: 3388 - DNA, 554 bp, Homo sapiens
ctagttttaaaggtatttgctcattggtctggcttagagacaggaagacatatgagcaataaaaaaaagattcttttgcatttaccaatttagtaaaaatttattaaaactgaataaagtgctgttcttaagtgcttgaaagacgtaaaccaaagtgcactttatctcatttatcttatggtggaaacacaggaacaaattctctaagagactgtgtttctttagttgagaagaaacttcattgagtagctgtgatatgttcgatactaaggaaaaactaaacagatcacctttgacatgcgttgtagagtgggaataagagagggctttttattttttcgttcatacgagtattgatgaagatgatactaaatgctaaatgaaatatatctgctccaaaaggcatttattctgacttggagatgcaacaaaaacacaaaaatggaatgaagtgatattcttcatcaaacagaagtgactgttatctcaaccattttgttaaatcctaaacagaaaacaaaaaaatcatgacgaaaagacacttgcttattaat

SEQ ID NO: 3389 - DNA, 570 bp, Homo sapiens
catgttgcccaggctggtttcgaactcctgacctcaggtgatccacccgcctcggcctcccaaagtgctgggattacaggcttgagcccccgcgcccagccatcaaaatgctttttatttctgcatatgttgaatactttttacaatttaaaaaaatgatctgttttgaaggcaaaattgcaaatcttgaaattaagaaggcaaaaatgtaaaggagtcaaaactataaatcaagtatttgggaagtgaagacgaagctaatttgcattaaattcacaaacttttatactctttctgtatatatatttttttctttaaaaaacaactatggatcagaatagccacatttggaacactttttgttatcagtcaatatttttagatagttagaacctggtcctaagcctaaaagtgggcttgattctgcagtaaatcttttacaactgcctcgacacacataaaccttttaaaaatagacactccccgaagtcttttgttcgcatggtcacacactgatgcttagatgttccagtaatctaatatggccacagtagtcttgatgaccaaagt

SEQ ID NO: 3390 - DNA, 538 bp, Homo sapiens
acccatgtggcagtaaacttaaaacttccagtttcaggttttgttgtttgtttgtttgtttgttttaaagagttgttaatgggggaaaggaaaggaatatgtgagggagattggcttgcaaagcctaaaatatttcttatgtggccctatatagaaaaagcttgtgtattctggacaagagcaattaaaggaaatagtttggacttaaaacttctaaaaataaatagtgctcaaattgcacttggaagtcagagaccttgctggtcatcaaagggttcagttcagtcagtagttagaaaagacagaagccagcttagccaagagtcagaatacaaatattcagaaccgattaataggcaaataattatatataccatgtcccagccagtagatggaataatatgccaccattaaatttatattaacatgtaaaaatgtttggagtttagggctctttacccatatcttagtgacataggaagaaaattaagataaatcacaagcaactagaaaatagacatgttaactttattttagt

SEQ ID NO: 3391 - DNA, 144 bp, Homo sapiens
accgagcaaatgccaggtctagcaaacataatgctagtcctagattacttattgatttaaaaacaaaaaaacacaaaaaaatagtaaaatataaaaacaaattaatgttttatagaccctgggaaaaagaattttcagcaaagt

SEQ ID NO: 3392 - DNA, 424 bp, Homo sapiens
  misc_feature 15, 17, 19, 22, 28, 30, 44, 60, 65, 67, 106, 202, 208, 219,238, 267, 270, 304, 313, 330, 351, 357, 371, 384, 420, 423: n = A,T,C or G
agcgtggcgcggccnangntgnacatancntgatgtggcttatnattttgaaaaagatgntaaangngaatccttgtttcattctaagaaaatggacctgacagtnaatggggaacaactggatctggatcctggtcaaactttaatttattatgttgatgaaaaagcacctgaattctcaatgcagagtctaaaagctggngttatngctgttattgnggttgtggtgatagcagtngttgctggaattgttgtgctggttatttncanaaagaagagaatggcaaagtatgagaaggctganataaagganatgggtgagatgcatanggaactcaatgcataactatntaattngaagattatagaanaagggaaatagcnaatggacacaaattacaaatgtgtgtgcgtgggacnaana

SEQ ID NO: 3393 - DNA, 560 bp, Homo sapiens
actaaaggagataagtgtaagttctcccatgacttgactctggagagaaaatgtgaaaagcgaagtgtttacattgatgcaagagatgaagaacttgaaaaagatactatggataattgggatgagaaaaagctggaagaagtagtgaacaagaagcacggtgaggcggaaaagaaaaaaccaaaaactcaaatagtgtgcaagcatttcctggaagctattgaaaacaacaagtatggctggttttgggtatgccctggagggggtgatatttgcatgtatcgtcatgcacctcctcctggatttgtgttgaaaaaagataaaaagaaagaagagaaagaagatgaaatttcattagaagatctaattgagagagagcgttctgccctaggtccaaatgttaccaaaatcactctagaatcttttcttgcctggaagaaaaggaaaagacaagaaaagattgataaacttgaacaagatatggaaagaaggaaagctgacttcaaagcagggaaagcactagtgatcagtggtcgtgaagtgtttgaattttcgtcctg

SEQ ID NO: 3394 - DNA, 377 bp, Homo sapiens
tgccacagatgattccctgcatcaactaagaaaagcctgttttctttatttcaaacttggtggcgaatgtgttgcgggtcccgttgggctgctttctgtattgtctcctaaccctctagttttaattggacacttctttgctgttgcaatctatgctgtgtatttttgctttaagtcagaaccttggattacaaaacctcgagcccttctcagtagtggtgctgtattgtacaaagtgtgttctgtaatatttcctctaatttactcagaaatgaagtatatggttcattaagcttaaaggggaaccatttgtgaatgaatatttggaacttaccaagtcctaagagacttttggaagaggatatatatagcatagt

SEQ ID NO: 3395 - DNA, 304 bp, Homo sapiens
gtccgagaccatccttggcggcctggggctccggctgggcggcagcgactgcagagtgaaaattgataccaaggccattccactgtttgggaactccctgaagcctgacagtctccggttccagctggagacgtcactgaagcggctgcagtgtccccgagtggacctcttctacctgcatatgccagaccacagcaccccggtggaagagacactgcgtgcctgccaccagctgcaccaggagggcaagttcgtggagcttggcctctccaactatgccgcctgggaagtggccgagatctgt

SEQ ID NO: 3396 - DNA, 259 bp, Homo sapiens
acaataattttatttgattaagcttcaggactgttttgtaaagcgaggcgggaccgatgtggcacacgccagctgcggtttcccggagcgtggagaggcagtgctgctgctcccgcccgaggctcatgacaactcaataaagcactgcttttattttttgcagtcttcaatttgagaaaggtgagaaataatgttttcaataaatgagattcataccattaaaaaaaaaaagtcgagtgaggcgtggtggctcgcaccc

SEQ ID NO: 3397 - DNA, 473 bp, Homo sapiens; identical to SEQ ID NO: 2542

SEQ ID NO: 3398 - DNA, 530 bp, Homo sapiens
  misc_feature 461: n = A,T,C or G
ggcggaggttgcagggagccaagatggcgccaccgcactccagcctaggtgatagagtgagactccctctcaaaaacaaaacaaaacaaaaaattagacaaatgctacattaatgtttgggtggtcagattctactttgaatctgaagtttgcagatatgcctatagatttttggagtttaccactttcttattctgtatcattaatgtaatattttaaattactatatatgttaccatttttctggatttagtaagaaatttgcagttttggtttgatgtaacaagggttttaatgtaatttatgttagattttgcatttttttcattactgttatattttaacctgactgactgatctaattgtattagtattgtgaataatcatgtgaaatgttttgagacagagtacagcactcgcatgcagcgttctactaagtcgcgggcctcggtctggcttancactggctgcttctccagaacttctcgcagcagaggctgagccaagtatgcaccataaccagtggccag

SEQ ID NO: 3399 - DNA, 234 bp, Homo sapiens
acctgagtggttattaaaaacgatttgaagagatttcctgggtgtggagtgtgactttccaaaaccagcttttccttgagctgtatttgttgcagcaatgtttaggagattgacttttgcacaactgctttttgccactgtccttggaattgctggaggagtatatatttttcaaccagtatttgaacagtatgccaaagatcagaaggaattaaaagaaaagatgcagttggt

SEQ ID NO: 3400 - DNA, 316 bp, Homo sapiens
accagggaggcatgacattgcttttgttgaatttgaaaatgatgggcaggctggagctgccagggatgctttacagggatttaagatcacaccgtcccatgctatgaagatcacctatgccaagaaataacatttgggatagtcgtctttaaaagacttggtgttatttacagtgtttgttttgataacatttggctgggtcattttaatagttagagatgaggaggagtaaaagtgaaatttttgtgaaggacttaaattatccagtgtttctttagccttggtgaactatgaaatacgaaggccttaattttgt

SEQ ID NO: 3401 - DNA, 432 bp, Homo sapiens
accaaaaaaggaggtcagatgtcctttatttacaaatcatatttaatcccatttacagaaaggcaaatattacactggagaggcagcataatagagtataaagaactctcaacttcgagtcagaagatctgaatctttttggctttgccactaattttctctgtgactttgagcaaatgagagtttttctgggcttcggttttctcatctgtaaaatgagaggtagaactacactgcttctaaagccagtccttgcttagatgtaaaattctgtgttaagcaatgtaaatatggttcttaagttttggaattacataacagggttctaccatattaataatctctgtaaaaactgattattccataataggtaggtaaaaacattatagaactgtgatcaaatacattttgagttcatgatttggctgctgt

SEQ ID NO: 3402 - DNA, 356 bp, Homo sapiens
tgtccttcaccttttaagttcagggaacagtttgtcctgaccacacatatgttatcagtgtaatgctttatgaagctttagaaatgagctcatgactcattaaaaaataataaacgatgctattttaatattttcaaataaataatctgaggatgtgtttcatactttagcatcaacgctgagttgtgccttgtagaattgcattgtctatacatgcaaaagactattaagttaggatgaactagattccctaattacagtgaaattctatcttgcaaatgctatagaataacttgcattttaaagtgtatttgcacattttacatatgctatgtggttgcctttgggttttctgt

SEQ ID NO: 3403 - DNA, 481 bp, Homo sapiens
acggccagggctattggttgaatgagtaggctgatggtttcgataataactagtatggggataaggggtgtaggtgtgccttgtggtaagaagtgggctagggcatttttaatcttagagcgaaagcctataatcactgcgcccgctcataaggggatggccatggctaggtttatagatagttgggtggttggtgtaaatgagtgaggcaggagtccgaggaggttagttgtggcaataaaaatgattaaggatactagtataagagatcaggttcgtcctttagtgttgtgtatggttattatttgttttgaggttagtttgattagtcattgttggctaaataagctatcgggcccataccccgaaaatgttggttatacccttcccgtcgtggatacagaaatctctgcaggcaagttgctccagagcatattgcaggacaagcctgtaacgaatagttaaattcacggcatctgga

SEQ ID NO: 3404 - DNA, 473 bp, Homo sapiens; identical to SEQ ID NO: 175

SEQ ID NO: 3405 - DNA, 115 bp, Homo sapiens
  misc_feature 40, 46, 47, 60, 63, 65, 67: n = A,T,C or G
acaagcttttttttttttttttttttttttttattattanttactnnatcaaagtaactnttntntnagacatatttcttaggtttgaggggggaatgcctggaaattgtaatgg

SEQ ID NO: 3406 - DNA, 304 bp, Homo sapiens
  misc_feature 97, 244, 245, 275, 290, 297: n = A,T,C or G
actcccctccttgaactaggattgtagtcccaaagaggctactgtaaggcaatcatggtgctcagagcagtgtttcgtgtgtgttttaaactggtangaaactaggtgcatatttataaaaataaaaaacactgggagaaatgaaaaaatatatatcaaatatattcagcctggcttcaaattgtaagcatgcacaaattctgtctctggattatattatgaagcttttatgtgaaacatgttnntttgtaatgaaaaccacattggagatgttnagtaatcatattgtnactgggnccaagac

SEQ ID NO: 3407 - DNA, 437 bp, Homo sapiens
actattgacccagcgatgggggcttcgacatgggctttagggagtcataagtggagtccgtaaagaggtatctttactataaaagctattgtgtaagctagtcatattaagttgttggctcaggagtttgatagttcttgggcagtgagagtgagtagtagaatgtttagtgagcctagggtgttgtgagtgtaaattagtgcgatgagtaggggaagggagcctactagggtgtagaataggaagtatgtgcctgcgttcaggcgttctggctggttgcctcatcgggtgatgatagccaaggtggggataagtgtggtttcgaagaagatataaaatatgattagttctgtggctgtgaatgttataattaaggagatttgtagggagattagtatagagaggtagagtttttttcgtgatagtggttcactgga

SEQ ID NO: 3408 - DNA, 351 bp, Homo sapiens
actcgcctcacctgagcctgggaggaaaattcttccaaggatgatctcccactcagagctgaggaagcttttctactcagcagatgctgtgtgttttgatgttgacagcacggtcatcagtgaagaaggaatcggatgctttcattggatttggaggaaatgtgatcaggcaacaagtcaaggataacgccaaatggtatatcactgattttgtagagctgctgggagaaccggaagaataacatccattgtcatacagctccaaacaacttcagatgaattcttacaagttacacagattgatactgtttgcttacaattgcctattacaacttgctatagaaagttggt

SEQ ID NO: 3409 - DNA, 196 bp, Homo sapiens
acacaaagggacaaggcaaatttcttttttcgtgtgggtagacttagttggcccaagtccttaaaacttttccatataaaaataaaaagtccaagaccagattatttttcttctggtcataaatgctgatttatttacaggtgccttgttcagaccaccattataaacttgggataaaatatgtgtgtattaaagc

SEQ ID NO: 3410 - DNA, 473 bp, Homo sapiens; identical to SEQ ID NO: 175

SEQ ID NO: 3411 - DNA, 525 bp, Homo sapiens
acaaaaaatatcccaaatctcatatgactttgaaatcttgagagacattatcgcctaggaccccctcttcctctgccacggccacgtcctcttcctcttcctcttcctctgcctcttcctgcaactgaaggaaaagaaaaacaaaccaagttcaattctctcctgcaccaatgttacctagacaccacaaacaacatttacacacacacctttccctgtttatagctctttattagtagctacagtaaataaagtttaactagcttctgttaaatgtgttagacttcagattccctccaccccccaacacattatcatgcagaaccaataactaaaggcctagggagattattatttgtttcatttcaatttatttactaagaaatgtgtcaaatttaaaaatactttttctttatatcatgtctcaaattcaccataaaatgatttgaacctcacaaaaaaagggaagatatatatcacagaataaaacatgatcaccttgatgccagagttttggtaactgaa

SEQ ID NO: 3412 - DNA, 426 bp, Homo sapiens
acctcttttcagtgaatctgacaagatccacattgccctggggggctgtgaggaggtccagggtctgcccaatctcagtctgataggaactctgcaggaagagctcgatcaggttcaggtaatagggctgctcccggcaatagagcttcagcaggcggtagatacatgcttccaggaggttagcatcattgatggcatccaaacccacgcccggcttctgataccagcagatctgtccccggcgggtaagggatgaatccatgatgtcatctgccaccaggaagaaagcttgcagcagttccacacaccagcccacagtccaggcccgctggagactatcagcatcctgtttccttggctccaccagctcccggaatgctactaccaccgtcaaaccccggttatacttgcctccaatggcattgt

SEQ ID NO: 3413 - DNA, 242 bp, Homo sapiens
  misc_feature 55, 57, 76, 79, 94, 95, 99, 126, 131, 134, 187, 238: n = A,T,C or G
ttttaaaaataactaagatgcaaaaaaataaattcttcaagtatgaacactaaantntgataactaatattatccntantgatcctattgatcnnaagntatttacatgtatgtggaaaaacaaancactnaantagaattctctaataaggtttatggtttagcttaaagagcacctttgtatttntattatcagatggggcaacatattgtatgaagcatatgtagcacttcacancatg

SEQ ID NO: 3414 - DNA, 522 bp, Homo sapiens
acttctgatagctcatcactttctgtgtcagaactttgaaaagcaaagacaggacatcgacttccttcgagactgcctactgattcttctagaagacagagatctactggggtagtccgggactgactgcaaagagcctcaggtaaagcagaggccattggcagcctaaggttggcagtcaaagaggctgcggaaggttgaaaatgaaaaggagagtaagcagagggatgataagacccaaaacctctgatgggatcagggtctgtaggaagagagaaatgaagctggggagaatccagctcagggaaggtgccagcagaaggcctggtagtaaagcccccaggatgttgcagtggagcagactgtgcagagcttaatgagctccctgaaaaaacaatgccacaatagggtgcagaaggtgggttctggggaggtcctgtgggacaagacgccgactgtgggatccagtcagcacaagtgccaggcacagggccttggctgaattgagatgcatcaaactgt

SEQ ID NO: 3415 - DNA, 339 bp, Homo sapiens
actcagacacacacactccaacccatcacacgaacacaccctcgcccgcccatcagagaagaattcgcctggaatcagctgggggcggtggctcacgcctataatcccagcactttgggaggttgaggcgggcagatcatgaggtcaggagttcacgaccagcctgaccaacatggtgaaaccctatctctactaaaaatacaaaaatcagcggggcctggtggcatgcacctgtaatcccagctactcaggaggctgaggtaggagaatcgcttgagacagaggttgcagtgagccgagatgcgccactgcactcctgcctgggcaacagagcaagac

SEQ ID NO: 3416 - DNA, 387 bp, Homo sapiens
ctcaatggccagcgccagctgcagccccggcggcgcactcgcctcacctgagcctgggaggaaaattcttccaaggatgatctcccactcagagctgaggaagcttttctactcagcagatgctgtgtgttttgatgttgacagcacggtcatcagtgaagaaggaatcggatgctttcattggctttggaggaaatgtgatcaggcaacaagtcaaggataacgccaaatggtatatcactgattttgtagagctgctgggagaaccggaagaataacatccattgtcatacagctccaaacaacttcagatgaatttttacaagttacacagattgatactgtttgcttacaattgcctattacaacttgctatagaaagttggt

SEQ ID NO: 3417 - DNA, 527 bp, Homo sapiens
  misc_feature 511: n = A,T,C or G
actagttacaaatcacagtataagatttaagtgcctgggggaaggatacaatttttagaaattacatattgggtcagttttgttttgtttttggtgaggaaaaggtggtaaataggaaaccatgaatgggaaggatggcaataagtagcaactatactttccaatgactaaagaaagaaaatctcagtatattcgttctcatgaagacacagtcagacactggacaatgtaatgtatgcaactgcaaacgttacaactgcagccagaacaatggctgggtggatcgcacgtaaagcttgccactaaaaatcaaagcagaggttaacaggaaacctggggggagtgtggaaaagggaaaactgttttagctgaataaaggtgaattatataatttataatagctgtggatgagcacaggagagagaggaaagaaaagaacagtcgaaatgagcaactcaccttaccctctgaccctgattagacaggatcaattgtaaagtgagggcttctncatgacaccatagttc

What is claimed:

1. An isolated polynucleotide comprising a sequence selected from the group consisting of:
(a) sequences provided in SEQ ID NOs: 1-1421, 1425, 1427, and 1430-3417;
(b) complements of the sequences provided in SEQ ID NOs: 1-1421, 1425, 1427, and 1430-3417;
(c) sequences consisting of at least 20 contiguous residues of a sequence provided in SEQ ID NOs: 1-1421, 1425, 1427, and 1430-3417;
(d) sequences that hybridize to a sequence provided in SEQ ID NOs: 1-1421, 1425, 1427, and 1430-3417, under highly stringent conditions;
(e) sequences having at least 75% identity to a sequence of SEQ ID NOs: 1-1421, 1425, 1427, and 1430-3417;
(f) sequences having at least 90% identity to a sequence of SEQ ID NOs: 1-1421, 1425, 1427, and 1430-3417; and
(g) degenerate variants of a sequence provided in SEQ ID NOs: 1-1421, 1425, 1427, and 1430-3417.

2. An isolated polypeptide comprising an amino acid sequence selected from the group consisting of:
(a) sequences encoded by a polynucleotide of claim 1; and
(b) sequences having at least 70% identity to a sequence encoded by a polynucleotide of claim 1; and
(c) sequences having at least 90% identity to a sequence encoded by a polynucleotide of claim 1.
(d) sequences set forth in SEQ ID NOs: 1422-1424, 1426, 1428, and 1429;
(e) sequences having at least 70% identity to a sequence set forth in SEQID NOs: 1422-1424, 1426, 1428, and 1429; and
(f) sequences having at least 90% identity to a sequence set forth in SEQID NOs: 1422-1424, 1426, 1428, and 1429.

3. An expression vector comprising a polynucleotide of claim 1 operably linked to an expression control sequence.

4. A host cell transformed or transfected with an expression vector according to claim 3.

5. An isolated antibody, or antigen-binding fragment thereof, that specifically binds to a polypeptide of claim 2.

6. A method for detecting the presence of a cancer in a patient, comprising the steps of:
(a) obtaining a biological sample from the patient;
(b) contacting the biological sample with a binding agent that binds to a polypeptide of claim 2;
(c) detecting in the sample an amount of polypeptide that binds to the binding agent; and
(d) comparing the amount of polypeptide to a predetermined cut-off value and therefrom determining the presence of a cancer in the patient.

7. A fusion protein comprising at least one polypeptide according to claim 2.

8. An oligonucleotide that hybridizes to a sequence recited in SEQ ID NOs: 1-1421, 1425, 1427, and 1430-3417 under highly stringent conditions.

9. A method for stimulating and/or expanding T cells specific for a tumor protein, comprising contacting T cells with at least one component selected from the group consisting of:
(a) polypeptides according to claim 2;
(b) polynucleotides according to claim 1; and
(c) antigen-presenting cells that express a polynucleotide according to claim 1,
under conditions and for a time sufficient to permit the stimulation and/or expansion of T cells.

10. An isolated T cell population, comprising T cells prepared according to the method of claim 9.

11. A composition comprising a first component selected from the group consisting of physiologically acceptable carriers and immunostimulants, and a second component selected from the group consisting of:
(a) polypeptides according to claim 2;
(b) polynucleotides according to claim 1;
(c) antibodies according to claim 5;
(d) fusion proteins according to claim 7;
(e) T cell populations according to claim 10; and
(f) antigen presenting cells that express a polypeptide according to claim 2.

12. A method for stimulating an immune response in a patient, comprising administering to the patient a composition of claim 11.

13. A method for the treatment of a colon cancer in a patient, comprising administering to the patient a composition of claim 11.

14. A method for determining the presence of a cancer in a patient, comprising the steps of:
(a) obtaining a biological sample from the patient;
(b) contacting the biological sample with an oligonucleotide according to claim 8;
(c) detecting in the sample an amount of a polynucleotide that hybridizes to the oligonucleotide; and
(d) comparing the amount of polynucleotide that hybridizes to the oligonucleotide to a predetermined cut-off value, and therefrom determining the presence of the cancer in the patient.

15. A diagnostic kit comprising at least one oligonucleotide according to claim 8.

16. A diagnostic kit comprising at least one antibody according to claim 5 and a detection reagent, wherein the detection reagent comprises a reporter group.

17. A method for the treatment of colon cancer in a patient, comprising the steps of:
(a) incubating CD4+ and/or CD8+ T cells isolated from a patient with at least one component selected from the group consisting of: (i) polypeptides according to claim 2; (ii) polynucleotides according to claim 1; and (iii) antigen presenting cells that express a polypeptide of claim 2, such that T cell proliferate;
(b) administering to the patient an effective amount of the proliferated T cells,
and thereby inhibiting the development of a cancer in the patient.
